(19) United States
(12) Patent Application Publication
(10) Pub. No.: US 2009/0148447 A1
(43) Pub. Date: Jun. 11, 2009

(54) Binding Peptides Having a C-terminally Disposed Specific Binding Domain

(75) Inventors: Jeffrey A. Ledbetter, Shoreline, WA (US); William Brady, Bothell, WA (US)

Correspondence Address: MARSHALL, GERSTEIN & BORUN LLP, 233 SOUTH WACKER DRIVE, 6300 SEARS TOWER, CHICAGO, IL, 60606-6357, US

(73) Assignee: TRUBION PHARMACEUTICALS, INC., Seattle, WA (US)

(21) Appl. No.: 12/168,875

(22) Filed: Jul. 7, 2008

Related U.S. Application Data
(60) Provisional application No. 60/948,397, filed on Jul. 6, 2007.

(51) Int. Cl. A61K 39/395; C07K 16/18; C12P 21/02

(52) U.S. Cl. 424/134.1; 530/387.3; 435/69.6

(57) ABSTRACT

Specific binding peptides having a general schematized structure of an optional N-terminal hinge region joined to an immunoglobulin-derived constant sub-region comprising a C_{H2} region and a C_{H3} region, followed by a PIMS linker peptide and at least one specific binding domain are provided, along with encoding nucleic acids, vectors and host cells. Also provided are methods for making such peptides and methods for using such peptides to treat or prevent a variety of diseases, disorders or conditions, as well as to ameliorate at least one symptom associated with such a disease, disorder or condition.

### FIELD

[0001] The invention relates generally to the field of specific binding molecules and therapeutic applications thereof.

### BACKGROUND

[0002] In a healthy mammal, the immune system protects the body from damage from foreign substances and pathogens. In some instances though, the immune system goes awry, producing traumatic insult and/or disease. For example, B-cells can produce antibodies that recognize self-proteins rather than foreign proteins, leading to the production of the autoantibodies characteristic of autoimmune diseases such as lupus erythematosus, rheumatoid arthritis, and the like. In other instances, the typically beneficial effect of the immune system in combating foreign materials is counterproductive, such as following organ transplantation. The power of the mammalian immune system, and in particular the human immune system, has been recognized and efforts have been made to control the system to avoid or ameliorate the deleterious consequences to health that result either from normal functioning of the immune system in an abnormal environment (e.g., organ transplantation) or from abnormal functioning of the immune system in an otherwise apparently normal environment (e.g., autoimmune disease progression). Additionally, efforts have been made to exploit the immune system to provide a number of target-specific diagnostic and therapeutic methodologies, relying on the capacity of antibodies to specifically recognize and bind antigenic targets with specificity.

[0003] One way in which the immune system protects the body is by production of specialized cells called B lymphocytes or B-cells. B-cells produce antibodies that bind to, and in some cases mediate destruction of, a foreign substance or pathogen. In some instances though, the human immune system, and specifically the B lymphocytes of the human immune system, go awry and disease results. There are numerous cancers that involve uncontrolled proliferation of B-cells. There are also numerous autoimmune diseases that involve B-cell production of antibodies that, instead of binding to foreign substances and pathogens, bind to parts of the body. In addition, there are numerous autoimmune and inflammatory diseases that involve B-cells in their pathology, for example, through inappropriate B-cell antigen presentation to T-cells or through other pathways involving B-cells. For example, autoimmune-prone mice deficient in B-cells do not develop autoimmune kidney disease, vasculitis or autoantibodies. (Shlomchik et al., J. Exp. Med. 1994, 180:1295-306). Interestingly, these same autoimmune-prone mice which possess B-cells but are deficient in immunoglobulin production, do develop autoimmune diseases when induced experimentally (Chan et al., J. Exp. Med. 1999, 189:1639-48), indicating that B-cells play an integral role in development of autoimmune disease.

[0004] B-cells can be identified by molecules on their cell surface. CD20 was the first human B-cell lineage-specific surface molecule identified by a monoclonal antibody. It is a non-glycosylated, hydrophobic 35 kDa B-cell transmembrane phosphoprotein that has both its amino and carboxy ends situated inside the cell. Einfeld et al., EMBO J. 1988, 7:711-17. CD20 is expressed by all normal mature B-cells, but is not expressed by precursor B-cells or plasma cells. Natural ligands for CD20 have not been identified, and the function of CD20 in B-cell biology is still incompletely understood.

[0005] Another B-cell lineage-specific cell surface molecule is CD37. CD37 is a heavily glycosylated 40-52 kDa protein that belongs to the tetraspanin transmembrane family of cell surface antigens. It traverses the cell membrane four times forming two extracellular loops and exposing its amino and carboxy ends to the cytoplasm. CD37 is highly expressed on normal antibody-producing (sIg+)B-cells, but is not expressed on pre-B-cells or plasma cells. The expression of CD37 on resting and activated T cells, monocytes and granulocytes is low and there is no detectable CD37 expression on NK cells, platelets or erythrocytes. See, Belov et al., Cancer Res., 61(11):4483-4489 (2001); Schwartz-Albiez et al., J. Immunol., 140(3): 905-914 (1988); and Link et al., J. Immunol., 137(9): 3013-3018 (1988). Besides normal B-cells, almost all malignancies of B-cell origin are positive for CD37 expression, including CLL, NHL, and hairy cell leukemia (Moore, et al. 1987; Merson and Brochier 1988; Faure, et al. 1990). CD37 participates in regulation of B-cell function, since mice lacking CD37 were found to have low levels of serum IgG1 and to be impaired in their humoral response to viral antigens and model antigens. It appears to act as a nonclassical costimulatory molecule or by directly influencing antigen presentation via complex formation with MHC class II molecules. See Knobeloch et al., Mol. Cell. Biol., 20(15):5363-5369 (2000).

[0006] Research and drug development has occurred based on the concept that B-cell lineage-specific cell surface molecules such as CD37 and CD20 can themselves be targets for antibodies that would bind to, and mediate destruction of, cancerous and autoimmune disease-causing B-cells that have CD37 and CD20 on their surfaces. Termed “immunotherapy,” antibodies made (or based on antibodies made) in a non-human animal that bind to CD37 or CD20 were given to a patient to deplete cancerous or autoimmune disease-causing B-cells.

[0007] Monoclonal antibody technology and genetic engineering methods have facilitated development of immunoglobulin molecules for diagnosis and treatment of human diseases. The domain structure of immunoglobulins is amenable to engineering, in that the antigen binding domains and the domains conferring effector functions may be exchanged between immunoglobulin classes and subclasses. Immunoglobulin structure and function are reviewed, for example, in Harlow et al., Eds., Antibodies: A Laboratory Manual, Chapter 14, Cold Spring Harbor Laboratory, Cold Spring Harbor (1988). An extensive introduction as well as detailed information about all aspects of recombinant antibody technology can be found in the textbook “Recombinant Antibodies” (John Wiley & Sons, NY, 1999). A comprehensive collection of detailed antibody engineering lab Protocols can be found in R. Kontermann and S. Dübel (eds.), “The Antibody Engineering Lab Manual” (Springer Verlag, Heidelberg/New York, 2000).

[0008] An immunoglobulin molecule (abbreviated Ig), is a multimeric protein, typically composed of two identical light chain polypeptides and two identical heavy chain polypeptides (H₂L₂) that are joined into a macromolecular complex by interchain disulfide bonds, i.e., covalent bonds between the sulfhydryl groups of neighboring cysteine residues. Five human immunoglobulin classes are defined on the basis of their heavy chain composition, and are named IgG, IgM, IgA, IgE, and IgD. The IgG-class and IgA-class antibodies are further divided into subclasses, namely, IgG1, IgG2, IgG3, and IgG4, and IgA1 and IgA2, respectively. Intrachain disulfide bonds join different areas of the same polypeptide chain, which results in the formation of loops that, along with adjacent amino acids, constitute the immunoglobulin domains. At the amino-terminal portion, each light chain and each heavy chain has a single variable region that shows considerable variation in amino acid composition from one antibody to another. The light chain variable region, V_{L}, has a single antigen-binding domain and associates with the variable region of a heavy chain, V_{H} (also containing a single antigen-binding domain), to form the antigen binding site of the immunoglobulin, the Fv.

[0009] In addition to variable regions, each of the full-length antibody chains has a constant region containing one or more domains. Light chains have a constant region containing a single domain. Thus, light chains have one variable domain and one constant domain. Heavy chains have a constant region containing several domains. The heavy chains in IgG, IgA, and IgD antibodies have three domains, which are designated C_{H1}, C_{H2}, and C_{H3}; the heavy chains in IgM and IgE antibodies have four domains, C_{H1}, C_{H2}, C_{H3} and C_{H4}. Thus, heavy chains have one variable domain and three or four constant domains. Noteworthy is the invariant organization of these domains in all known species, with the constant regions, containing one or more domains, being located at or near the C-terminus of both the light and heavy chains of immunoglobulin molecules, with the variable domains located towards the N-termini of the light and heavy chains. Immunoglobulin structure and function are reviewed, for example, in Harlow et al., Eds., Antibodies: A Laboratory Manual, Chapter 14, Cold Spring Harbor Laboratory, Cold Spring Harbor (1988).

[0010] The heavy chains of immunoglobulins can also be divided into three functional regions: the Fd region (a fragment comprising V_{H} and C_{H1}, i.e., the two N-terminal domains of the heavy chain), the hinge region, and the Fc region (the “fragment crystallizable” region). The Fc region contains the domains that interact with immunoglobulin receptors on cells and with the initial elements of the complement cascade. Thus, the Fc region or fragment is generally considered responsible for the effector functions of an immunoglobulin, such as ADCC (antibody-dependent cell-mediated cytotoxicity), CDC (complement-dependent cytotoxicity) and complement fixation, binding to Fc receptors, greater half-life in vivo relative to a polypeptide lacking an Fc region, protein A binding, and perhaps even placental transfer. Capon et al., Nature, 337: 525-531, (1989). Further, a polypeptide containing an Fc region allows for dimerization/multimerization of the polypeptide. These terms are also used for analogous regions of the other immunoglobulins.

[0011] Although all of the human immunoglobulin isotypes contain a recognizable structure in common, each isotype exhibits a distinct pattern of effector function. IgG, by way of nonexhaustive example, neutralizes toxins and viruses, opsonizes, fixes complement (CDC) and participates in ADCC. IgM, in contrast, neutralizes blood-borne pathogens and participates in opsonization. IgA, when associated with its secretory piece, is secreted and provides a primary defense to microbial infection via the mucosa; it also neutralizes toxins and supports opsonization. IgE mediates inflammatory responses, being centrally involved in the recruitment of other cells needed to mount a full response. IgD is known to provide an immunoregulatory function, controlling the activation of B cells. These characterizations of isotype effector functions provide a non-comprehensive illustration of the differences that can be found among human isotypes.

[0012] The hinge region, found in IgG, IgA, IgD, and IgE class antibodies, acts as a flexible spacer, allowing the Fab portion to move freely in space. In contrast to the constant regions, the hinge domains are structurally diverse, varying in both sequence and length among immunoglobulin classes and subclasses. For example, the length and flexibility of the hinge region varies among the IgG subclasses. The hinge region of IgG1 encompasses amino acids 216-231 and, because it is freely flexible, the Fab fragments can rotate about their axes of symmetry and move within a sphere centered at the first of two inter-heavy chain disulfide bridges. IgG2 has a shorter hinge than IgG1, with 12 amino acid residues and four disulfide bridges. The hinge region of IgG2 lacks a glycine residue, is relatively short, and contains a rigid poly-proline double helix, stabilized by extra inter-heavy chain disulfide bridges. These properties restrict the flexibility of the IgG2 molecule. IgG3 differs from the other subclasses by its unique extended hinge region (about four times as long as the IgG1 hinge), containing 62 amino acids (including 21 prolines and 11 cysteines), forming an inflexible poly-proline double helix. In IgG3, the Fab fragments are relatively far away from the Fc fragment, giving the molecule a greater flexibility. The elongated hinge in IgG3 is also responsible for its higher molecular weight compared to the other subclasses. The hinge region of IgG4 is shorter than that of IgG1 and its flexibility is intermediate between that of IgG1 and IgG2. The flexibility of the hinge regions reportedly decreases in the order IgG3>IgG1>IgG4>IgG2. The four IgG subclasses also differ from each other with respect to their effector functions. This difference is related to differences in structure, including differences with respect to the interaction between the variable region, Fab fragments, and the constant Fc fragment.

[0013] According to crystallographic studies, the immunoglobulin hinge region can be further subdivided functionally into three regions: the upper hinge region, the core region, and the lower hinge region. Shin et al., 1992 Immunological Reviews 130:87. The upper hinge region includes amino acids from the carboxyl end of C_{H1} to the first residue in the hinge that restricts motion, generally the first cysteine residue that forms an interchain disulfide bond between the two heavy chains. The length of the upper hinge region correlates with the segmental flexibility of the antibody. The core hinge region contains the inter-heavy chain disulfide bridges, and the lower hinge region joins the amino terminal end of the C_{H2} domain and includes residues in C_{H2}. Id. The core hinge region of human IgG1 contains the sequence Cys-Pro-Pro-Cys which, when dimerized by disulfide bond formation, results in a cyclic octapeptide believed to act as a pivot, thus conferring flexibility. The hinge region may also contain one or more glycosylation sites, which include a number of structurally distinct types of sites for carbohydrate attachment. For example, IgA1 contains five glycosylation sites within a 17-amino-acid segment of the hinge region, conferring resistance of the hinge region polypeptide to intestinal proteases, considered an advantageous property for a secretory immunoglobulin.

[0014] Conformational changes permitted by the structure and flexibility of the immunoglobulin hinge region polypeptide sequence may also affect the effector functions of the Fc portion of the antibody. Three general categories of effector functions associated with the Fc region include (1) activation of the classical complement cascade, (2) interaction with effector cells, and (3) compartmentalization of immunoglobulins. The different human IgG subclasses vary in the relative efficacies with which they fix complement, or activate and amplify the steps of the complement cascade. See, e.g., Kirschfink, 2001 Immunol. Rev. 180:177; Chakraborti et al., 2000 Cell Signal 12:607; Kohl et al., 1999 Mol. Immunol. 36:893; Marsh et al., 1999 Curr. Opin. Nephrol. Hypertens. 8:557; Speth et al., 1999 Wien Klin. Wochenschr. 111:378.

[0015] Exceptions to the H₂L₂ structure of conventional antibodies occur in some isotypes of the immunoglobulins found in camelids (camels, dromedaries and llamas; Hamers-Casterman et al., 1993 Nature 363:446; Nguyen et al., 1998 J. Mol. Biol. 275:413), nurse sharks (Roux et al., 1998 Proc. Nat. Acad. Sci. USA 95:11804), and in the spotted ratfish (Nguyen, et al., 2002 Immunogenetics 54(1):39-47). These antibodies can apparently form antigen-binding regions using only heavy chain variable region, i.e., these functional antibodies are homodimers of heavy chains only (referred to as “heavy-chain antibodies” or “HCAbs”). Despite the advantages of antibody technology in disease diagnosis and treatment, there are some disadvantageous aspects of developing whole-antibody technologies as diagnostic and/or therapeutic reagents. Whole antibodies are large protein structures exemplified by the heterotetrameric structure of the IgG isotype, containing two light and two heavy chains. Such large molecules are sterically hindered in certain applications. For example, in treatments of solid tumors, whole antibodies do not readily penetrate the interior of the tumor. Moreover, the relatively large size of whole antibodies presents a challenge to ensure that the in vivo administration of such molecules does not induce an immune response. Further, generation of active antibody molecules typically involves the culturing of recombinant eukaryotic cells capable of providing appropriate post-translational processing of the nascent antibody molecules, and such cells can be difficult to culture and difficult to induce in a manner that provides commercially useful yields of active antibody.

[0016] Recently, smaller immunoglobulin molecules have been constructed to overcome problems associated with whole immunoglobulin methodologies. A single-chain variable antibody fragment (scFv) comprises an antibody heavy chain variable domain joined via a short peptide to an antibody light chain variable domain (Huston et al., Proc. Natl. Acad. Sci. USA, 1988, 85: 5879-83). Because of the small size of scFv molecules, they exhibit more effective penetration into tissues than whole immunoglobulin. An anti-tumor scFv showed more rapid tumor penetration and more even distribution through the tumor mass than the corresponding chimeric antibody (Yokota et al., Cancer Res. 1992, 52:3402-08).

[0017] Despite the advantages that scFv molecules bring to serotherapy, several drawbacks to this therapeutic approach exist. An scFv is rapidly cleared from the circulation, which may reduce toxic effects in normal cells, but such rapid clearance impedes delivery of a minimum effective dose to the target tissue. Manufacturing adequate amounts of scFv for administration to patients has been challenging due to difficulties in expression and isolation of scFv that adversely affect the yield. Another disadvantage to using scFv for therapy is the lack of effector function. Alternatively, it has been proposed that fusion of an scFv to another molecule, such as a toxin, could take advantage of the specific antigen-binding activity and the small size of an scFv to deliver the toxin to a target tissue, but dosing with such conjugates or chimeras can be limited by excessive and/or non-specific toxicity due to the toxin moiety of such preparations. In addition, immunotoxins are themselves highly immunogenic upon administration to a host, and host antibodies generated against the immunotoxin limit potential usefulness for repeated therapeutic treatments of an individual.

[0018] Nonsurgical cancer therapy, such as external irradiation and chemotherapy, can suffer from limited efficacy because of toxic effects on normal tissues and cells, due to the lack of specificity these treatments exhibit towards cancer cells. To overcome this limitation, targeted treatment methodologies have been developed to increase the specificity of the treatment for the cells and tissues in need thereof. An example of such a targeted methodology for in vivo use is the administration of antibody conjugates, with the antibody designed to specifically recognize a marker associated with a cell or tissue in need of treatment, and the antibody being conjugated to a therapeutic agent, such as a toxin in the case of cancer treatment. Antibodies, as systemic agents, circulate to sensitive and undesirable body compartments, such as the bone marrow. In acute radiation injury, destruction of lymphoid and hematopoietic compartments is a major factor in the development of septicemia and subsequent death. Moreover, antibodies are large, globular proteins that can exhibit poor penetration of tissues in need of treatment.

[0019] Human patients and non-human subjects suffering from a variety of end-stage disease processes frequently require organ transplantation. Organ transplantation, however, must contend with the untoward immune response of the recipient and guard against immunological rejection of the transplanted organ by depressing the recipient's cellular immune response to the foreign organ with cytotoxic agents which affect the lymphoid and other parts of the hematopoietic system. Graft acceptance is limited by the tolerance of the recipient to these cytotoxic chemicals, many of which are similar to the anticancer (antiproliferative) agents. Likewise, when using cytotoxic antimicrobial agents, particularly antiviral drugs, or when using cytotoxic drugs for autoimmune disease therapy, e.g., in treatment of systemic lupus erythematosis, a serious limitation is the toxic effects of the therapeutic agents on the bone marrow and the hematopoietic cells of the body.

[0020] Use of targeted therapies, such as targeted antibody conjugate therapy, is designed to localize a maximum quantity of the therapeutic agent at the site of desired action as possible, and the success of such therapies is revealed by the relatively high signal-to-background ratio of therapeutic agent. Examples of targeted antibodies include diagnostic or therapeutic agent conjugates of antibody or antibody fragments, cell- or tissue-specific peptides, and hormones and other receptor-binding molecules. For example, antibodies against different determinants associated with pathological and normal cells, as well as associated with pathogenic microorganisms, have been used for the detection and treatment of a wide variety of pathological conditions or lesions. In these methods, the targeting antibody is directly conjugated to an appropriate detecting or therapeutic agent as described, for example, in Hansen et al., U.S. Pat. No. 3,927,193 and Goldenberg, U.S. Pat. Nos. 4,331,647, 4,348,376, 4,361,544, 4,468,457, 4,444,744, 4,460,459, 4,460,561, 4,624,846 and 4,818,709.

[0021] One problem encountered in direct targeting methods, i.e., in methods wherein the diagnostic or therapeutic agent (the “active agent”) is conjugated directly to the targeting moiety, is that a relatively small fraction of the conjugate actually binds to the target site, while the majority of conjugate remains in circulation and compromises in one way or another the function of the targeted conjugate. To ensure maximal localization of the active agent, an excess of the targeted conjugate is typically administered, ensuring that some conjugate will remain unbound and contribute to background levels of the active agent.

[0022] Complement-dependent cytotoxicity (CDC) is believed to be a significant mechanism for clearance of specific target cells such as tumor cells. CDC is a series of events that consists of a collection of enzymes that become activated by each other in a cascade fashion. Complement has an important role in clearing antigen, accomplished by its four major functions: (1) local vasodilation; (2) attraction of immune cells, especially phagocytes (chemotaxis); (3) tagging of foreign organisms for phagocytosis (opsonization); and (4) destruction of invading organisms by the membrane attack complex (MAC attack). The central molecule is the C3 protein. It is an enzyme that is split into two fragments by components of either the classical pathway or the alternative pathway. The classical pathway is induced by antibodies, especially IgG and IgM, while the alternative pathway is nonspecifically stimulated by bacterial products like lipopolysaccharide (LPS). Briefly, the products of the C3 split include a small peptide C3a which is chemotactic for phagocytic immune cells and results in local vasodilation by causing the release of C5a fragment from C5. The other part of C3, C3b, coats antigens on the surface of foreign organisms and acts to opsonize the organism for destruction. C3b also reacts with other components of the complement system to form an MAC consisting of C5b, C6, C7, C8 and C9.

[0023] There are problems associated with the use of antibodies in human therapy because the response of the immune system to any antigen, even the simplest, is “polyclonal,” i.e., the system manufactures antibodies of a great range of structures both in their binding regions as well as in their effector regions. Two approaches have been used in an attempt to reduce the problem of immunogenic antibodies. The first is the production of chimeric antibodies in which the antigen-binding part (variable regions) of a mouse monoclonal antibody is fused to the effector part (constant region) of a human antibody. In a second approach, antibodies have been altered through a technique known as complementarity determining region (CDR) grafting or “humanization.” This process has been further improved to include changes referred to as “reshaping” (Verhoeyen, et al., 1988 Science 239:1534-1536; Riechmann, et al., 1988 Nature 332:323-337; Tempest, et al., Bio/Technol 1991 9:266-271), “hyperchimerization” (Queen, et al., 1989 Proc Natl Acad Sci USA 86:10029-10033; Co, et al., 1991 Proc Natl Acad Sci USA 88:2869-2873; Co, et al., 1992 J Immunol 148:1149-1154), and “veneering” (Mark, et al., In: Metcalf B W, Dalton B J, eds. Cellular adhesion: molecular definition to therapeutic potential. New York: Plenum Press, 1994:291-312).

[0024] A variety of antibody technologies have received attention in the effort to develop and market more effective therapeutics and palliatives. Unfortunately, problems continue to compromise the promise of each of these therapies. For example, the majority of cancer patients treated with rituximab relapse, generally within about 6-12 months, and fatal infusion reactions within 24 hours of rituximab infusion have been reported. Trastuzumab administration can result in the development of ventricular dysfunction, congestive heart failure, and severe hypersensitivity reactions (including anaphylaxis), infusion reactions, and pulmonary events. Daclizumab immunosuppressive therapy poses an increased risk for developing lymphoproliferative disorders and opportunistic infections. Death from liver failure, arising from severe hepatotoxicity, and from veno-occlusive disease (VOD), has been reported in patients who received gemtuzumab. Hepatotoxicity was also reported in patients receiving alemtuzumab.

[0025] Cancer includes a broad range of diseases, affecting approximately one in four individuals worldwide. Rapid and unregulated proliferation of malignant cells is a hallmark of many types of cancer, including hematological malignancies. Although patients with a hematologic malignant condition have benefited from advances in cancer therapy in the past two decades, Multani et al., 1998 J. Clin. Oncology 16:3691-3710, and remission times have increased, most patients still relapse and succumb to their disease. Barriers to cure with cytotoxic drugs include, for example, tumor cell resistance and the high toxicity of chemotherapy, which prevents optimal dosing in many patients.

[0026] Treatment of patients with low grade or follicular B cell lymphoma using a chimeric CD20 monoclonal antibody has been reported to induce partial or complete responses in patients. McLaughlin et al., 1996 Blood 88:90a (abstract, suppl. 1); Maloney et al., 1997 Blood 90:2188-95. However, as noted above, tumor relapse commonly occurs within six months to one year. Further improvements in serotherapy are needed to induce more durable responses, for example, in low grade B cell lymphoma, and to allow effective treatment of high grade lymphoma and other B cell diseases.

[0027] Autoimmune diseases include autoimmune thyroid diseases, which include Graves' disease and Hashimoto's thyroiditis. Another autoimmune disease is rheumatoid arthritis (RA), which is a chronic disease characterized by inflammation of the joints, leading to swelling, pain, and loss of function. RA is caused by a combination of events including an initial infection or injury, an abnormal immune response, and genetic factors. While autoreactive T cells and B cells are present in RA, the detection of high levels of antibodies that collect in the joints, called rheumatoid factor, is used in the diagnosis of RA. Current therapy for RA includes many medications for managing pain and slowing the progression of the disease. Systemic Lupus Erythematosus (SLE) is an autoimmune disease caused by recurrent injuries to blood vessels in multiple organs, including the kidney, skin, and joints. In patients with SLE, a faulty interaction between T cells and B cells results in the production of autoantibodies that attack the cell nucleus.

[0028] There are several other recognized autoimmune diseases. Sjogren's syndrome is an autoimmune disease characterized by destruction of the body's moisture-producing glands. Immune thrombocytopenic purpura (ITP) is caused by autoantibodies that bind to blood platelets and cause their destruction. Multiple sclerosis (MS) is also an autoimmune disease. It is characterized by inflammation of the central nervous system and destruction of myelin, which insulates nerve cell fibers in the brain, spinal cord, and body. Myasthenia Gravis (MG) is a chronic autoimmune neuromuscular disorder that is characterized by weakness of the voluntary muscle groups. MG is caused by autoantibodies that bind to acetylcholine receptors expressed at neuromuscular junctions. The autoantibodies reduce or block acetylcholine receptors, preventing the transmission of signals from nerves to muscles. Psoriasis affects approximately five million people, and is characterized by autoimmune inflammation in the skin. Scleroderma is a chronic autoimmune disease of the connective tissue that is also known as systemic sclerosis. Scleroderma is characterized by an overproduction of collagen, resulting in a thickening of the skin.

[0029] Apparent from the foregoing discussion are needs for improved compositions and methods to treat, ameliorate or prevent a variety of diseases, disorders and conditions, including cancer, inflammation and autoimmune diseases.

### SUMMARY

[0030] The invention satisfies at least one of the aforementioned needs in the art by providing proteins containing a constant sub-region derived from an antibody molecule joined through a linker (PIMS linker) that has an amino acid sequence derived from an antibody hinge region, or a region linking a binding domain, or a region linking a binding domain to a cell surface transmembrane region or membrane anchor, to at least one specific binding domain, as well as nucleic acids encoding such proteins, and to production, diagnostic and therapeutic uses of such proteins and nucleic acids. The proteins of the invention are referred to herein as PIMS molecules. The PIMS linker has an amino acid sequence derived from an antibody hinge region, or a region linking a binding domain, or a region linking a binding domain to a cell surface transmembrane region or membrane anchor. In some embodiments, the linker has at least one cysteine residue capable of participating in at least one disulfide bond under standard peptide conditions. In some embodiments, a PIMS molecule further comprises an N-terminal domain derived from an antibody hinge region that may be the same as, or different than, the PIMS linker joining the constant sub-region and the specific binding domain(s). Typical thinking had been that the placement of a constant region derived from an antibody in the interior of a protein or at the N-terminus thereof would interfere with effector function, by analogy to the conventional placement of constant regions of antibodies at the carboxy termini of antibody chains. Placement of a constant sub-region at the N-terminus or in the interior of a polypeptide or protein chain in accordance with the invention, however, resulted in proteins exhibiting effector function and specific binding capacities relatively unencumbered by steric hindrances. As will be apparent to one of skill in the art upon consideration of this disclosure, proteins of such structure, and the nucleic acids encoding those proteins, will find a wide variety of applications, including medical and veterinary applications.

[0031] In one aspect, the invention provides a preferred form of a specific binding protein comprising a constant sub-region comprising part or all of a C_{H2} domain and part or all of a C_{H3} domain; a PIMS linker region disposed C-terminal to the constant sub-region; and at least one specific binding domain comprising part or all of a V_{L} domain and part or all of a V_{H} domain and exhibiting the capacity to specifically bind a binding partner, the specific binding domain(s) disposed C-terminal to the PIMS linker, wherein the specific binding protein specifically binds at least one target and exhibits at least one effector function of an antibody molecule. Thus, in preferred PIMS protein molecules, the PIMS linker, and therefore the constant sub-region, are disposed N-terminal to each specific binding domain of the molecule. In some embodiments, at least one of the C_{H2} domain and the C_{H3} domain is a complete antibody domain. Suitable specific binding proteins of the invention include proteins with an antibody domain that is selected from the group consisting of IgG (IgG1, IgG2, IgG3, IgG4), IgE, IgD, IgA (IgA1, IgA2), and IgM antibody domains. Such molecules include specific binding proteins wherein the C_{H2} domain comprises a sequence set forth in SEQ ID NO:377 and/or the C_{H3} domain comprises a sequence set forth in SEQ ID NO:379. Exemplary effector functions provided by the constant sub-region include antibody-dependent cellular cytotoxicity and/or complement-mediated cytotoxicity.

[0032] A PIMS linker region suitable for use in the PIMS molecules according to the invention may be selected from the group consisting of an antibody hinge region, a stalk region of a Type II C-lectin molecule (e.g., a CD72 stalk region), an NKG2a region, an NKG2A C18S region and variants thereof. For example, a suitable PIMS linker includes an antibody hinge region selected from the group consisting of IgG, IgA, IgD and IgE hinges and variants thereof. For example, the PIMS linker may be an antibody hinge region selected from the group consisting of human IgG1, human IgG2, human IgG3, and human IgG4, and variants thereof. In some embodiments, the PIMS linker region has a single cysteine residue for formation of an interchain disulfide bond. In other embodiments, the PIMS linker has two cysteine residues for formation of interchain disulfide bonds. PIMS linker regions contemplated for use in the PIMS molecules include a hinge region comprising a sequence selected from the group consisting of SEQ ID NO:61 to SEQ ID NO:118.

[0033] Also contemplated as PIMS linker regions of PIMS molecules are residues 268-281 of SEQ ID NO:2, residues 268-282 of SEQ ID NO:3, residues 268-282 of SEQ ID NO:5, residues 268-282 of SEQ ID NO:6, residues 268-282 of SEQ ID NO:8, residues 268-281 of SEQ ID NO:9, residues 268-282 of SEQ ID NO:11, residues 268-282 of SEQ ID NO:12, residues 268-281 of SEQ ID NO:14, residues 268-282 of SEQ ID NO:16, residues 268-282 of SEQ ID NO:18, residues 268-282 of SEQ ID NO:20, residues 268-282 of SEQ ID NO:22, residues 268-282 of SEQ ID NO:24, residues 268-282 of SEQ ID NO:26, residues 268-282 of SEQ ID NO:28, residues 268-282 of SEQ ID NO:30, residues 279-293 of SEQ ID NO:32, residues 274-288 of SEQ ID NO:34, residues 274-288 of SEQ ID NO:34, residues 261-275 of SEQ ID NO:36, residues 268-283 of SEQ ID NO:38, residues 268-282 of SEQ ID NO:40, residues 270-284 of SEQ ID NO:42, residues 265-279 of SEQ ID NO:44, residues 265-279 of SEQ ID NO:46, residues 265-279 of SEQ ID NO:48, residues 265-279 of SEQ ID NO:50, residues 265-279 of SEQ ID NO:52, residues 265-279 of SEQ ID NO:54, residues 265-279 of SEQ ID NO:56, residues 265-279 of SEQ ID NO:58, residues 268-282 of SEQ ID NO:60, residues 24-38 of SEQ ID NO:359, residues 24-38 of SEQ ID NO:361, residues 24-38 of SEQ ID NO:363, residues 24-38 of SEQ ID NO:365, residues 24-38 of SEQ ID NO:367, residues 24-38 of SEQ ID NO:369, residues 23-37 of SEQ ID NO:371, residues 23-37 of SEQ ID NO:373 and residues 23-37 of SEQ ID NO:375. In addition, any sequence of amino acids identified in the sequence listing as providing the sequence of a hinge region is contemplated for use as a PIMS linker in the PIMS molecules according to the invention. More generally, a PIMS linker may be a hinge-like peptide domain having at least one free cysteine capable of participating in an interchain disulfide bond. Additionally, a PIMS linker is a stalk region of a Type II C-lectin molecule.

[0034] In some embodiments, the specific binding protein or PIMS protein (or polypeptide) specifically binds to one of a wide variety of targets, including but not limited to CD3, CD19, CD20, CD28, CD37 and DR. Exemplary PIMS molecules or proteins are specific binding proteins selected from the group consisting of W0001 (SEQ ID NO:359 encoded by, e.g., SEQ ID NO:358), W0002 (SEQ ID NO:361 encoded by, e.g., SEQ ID NO:360), W0003 (SEQ ID NO:363 encoded by, e.g., SEQ ID NO:362), W0004 (SEQ ID NO:365 encoded by, e.g., SEQ ID NO:364), W0005 (SEQ ID NO:367 encoded by, e.g., SEQ ID NO:366), W0006 (SEQ ID NO:369 encoded by, e.g., SEQ ID NO:368), W0007 (SEQ ID NO:371 encoded by, e.g., SEQ ID NO:370), W0008 (SEQ ID NO:373 encoded by, e.g., SEQ ID NO:372), W0009 (SEQ ID NO:375 encoded by, e.g., SEQ ID NO:374), W0011 (SEQ ID NO:391 encoded by, e.g., SEQ ID NO:390), W0012 (SEQ ID NO:405 encoded by, e.g., SEQ ID NO:404), W0023 (SEQ ID NO:407 encoded by, e.g., SEQ ID NO:406), W0024 (SEQ ID NO:409 encoded by, e.g., SEQ ID NO:408), W0025 (SEQ ID NO:411 encoded by, e.g., SEQ ID NO:410), W0028 (SEQ ID NO:487 encoded by, e.g., SEQ ID NO:486), W0029 (SEQ ID NO:481 encoded by, e.g., SEQ ID NO:480), W0030 (SEQ ID NO:483 encoded by, e.g., SEQ ID NO:482), W0031 (SEQ ID NO:485 encoded by, e.g., SEQ ID NO:484), W0035 (SEQ ID NO:490 encoded by, e.g., SEQ ID NO:489), W0036 (SEQ ID NO:492 encoded by, e.g., SEQ ID NO:491), W0041 (SEQ ID NO:498 encoded by, e.g., SEQ ID NO:497), W0042 (SEQ ID NO:500 encoded by, e.g., SEQ ID NO:499), W0044 (SEQ ID NO:504 encoded by, e.g., SEQ ID NO:503), W0045 (SEQ ID NO:506 encoded by, e.g., SEQ ID NO:505), W0050 (SEQ ID NO:453 encoded by, e.g., SEQ ID NO:452), W0051 (SEQ ID NO:455 encoded by, e.g., SEQ ID NO:454), W0052 (SEQ ID NO:457 encoded by, e.g., SEQ ID NO:456), W0053 (SEQ ID NO:459 encoded by, e.g., SEQ ID NO:458), W0055 (SEQ ID NO:511 encoded by, e.g., SEQ ID NO:510), W0056 (SEQ ID NO:494 encoded by, e.g., SEQ ID NO:493), W0057 (SEQ ID NO:508 encoded by, e.g., SEQ ID NO:507), W0083 (SEQ ID NO:461 encoded by, e.g., SEQ ID NO:460), W0087 (SEQ ID NO:496 encoded by, e.g., SEQ ID NO:495), W0094 (SEQ ID NO:445 encoded by, e.g., SEQ ID NO:444), W0095 (SEQ ID NO:447 encoded by, e.g., SEQ ID NO:446), W0096 (SEQ ID NO:449 encoded by, e.g., SEQ ID NO:448), W0097 (SEQ ID NO:451 encoded by, e.g., SEQ ID NO:450), DNE090 (SEQ ID NO:393 encoded by, e.g., SEQ ID NO:392), DNE091 (SEQ ID NO:395 encoded by, e.g., SEQ ID NO:394), DNE092 (SEQ ID NO:397 encoded by, e.g., SEQ ID NO:396), DNE093 (SEQ ID NO:399 encoded by, e.g., SEQ ID NO:398), DNE094 (SEQ ID NO:401 encoded by, e.g., SEQ ID NO:400) and DNE095 (SEQ ID NO:403 encoded by, e.g., SEQ ID NO:402).

[0035] Contemplated for use in a PIMS molecule is a PIMS linker comprising the amino acid sequence set forth in any one of SEQ ID NO:148, SEQ ID NO:150, SEQ ID NO:152, SEQ ID NO:154, SEQ ID NO:156, SEQ ID NO:158, SEQ ID NO:160, SEQ ID NO:162, SEQ ID NO:164, SEQ ID NO:166, SEQ ID NO:168, SEQ ID NO:172, SEQ ID NO:174, SEQ ID NO:176, SEQ ID NO:180, SEQ ID NO:182, SEQ ID NO:184, SEQ ID NO:186, SEQ ID NO:188, SEQ ID NO:190, SEQ ID NO:192, SEQ ID NO:194, SEQ ID NO:196, SEQ ID NO:198, SEQ ID NO:200, SEQ ID NO:202, SEQ ID NO:204, SEQ ID NO:206, SEQ ID NO:208, SEQ ID NO:210, SEQ ID NO:212, SEQ ID NO:214, SEQ ID NO:216, SEQ ID NO:222, SEQ ID NO:230, SEQ ID NO:238, SEQ ID NO:240, SEQ ID NO:242, SEQ ID NO:244, SEQ ID NO:246, SEQ ID NO:248, SEQ ID NO:541, SEQ ID NO:542, SEQ ID NO:543, SEQ ID NO:544, SEQ ID NO:545, SEQ ID NO:546, SEQ ID NO:547 and SEQ ID NO:548. Also contemplated are specific binding proteins wherein the V_{L} domain and the V_{H} domain are separated by an interdomain linker. In such embodiments, the interdomain linker may exhibit the structure of (Gly₄Ser)ₙ, where n is preferably 1-5. Exemplary interdomain linkers suitable for use in PIMS molecules include, but are not limited to, H11 (SEQ ID NO:544), H12 (SEQ ID NO:545), H17 (SEQ ID NO:184), H45 (SEQ ID NO:240) and H46 (SEQ ID NO:242), as well as (Gly4Ser)ₙ-based linkers such as those disclosed in SEQ ID NO:243, SEQ ID NO:245, SEQ ID NO:247, SEQ ID NO:248, SEQ ID NO:539 and SEQ ID NO:540. In addition, any sequence of amino acids identified in the sequence listing as providing the sequence of a linker is contemplated for use in the PIMS molecules according to the invention.

[0036] In some embodiments, the specific binding protein has at least one of the V_{L} domain and the V_{H} domain that comprises a sequence selected from the group consisting of residues 23-128 of SEQ ID NO:2, residues 145-265 of SEQ ID NO:2, residues 520-640 of SEQ ID NO:2, residues 661-772 of SEQ ID NO:2, residues 508-629 of SEQ ID NO:28, residues 647-754 of SEQ ID NO:28, residues 508-629 of SEQ ID NO:30, residues 652-759 of SEQ ID NO:30, residues 21-127 of SEQ ID NO:44, residues 143-264 of SEQ ID NO:44, residues 1-121 of SEQ ID NO:354 and residues 134-239 of SEQ ID NO:354. In order, the above sequences are the amino acid sequences of anti-CD20 antibody V_{L} (2H7), anti-CD20 antibody V_{H} (2H7), anti-CD28 antibody V_{H} (2E12), anti-CD28 antibody V_{L} (2E12), anti-CD3 antibody V_{H} (G19-4), anti-CD3 antibody V_{L} (G19-4), anti-CD37 antibody V_{H} (G28-1), anti-CD37 antibody V_{L} (G28-1), anti-CD20 antibody V_{H} (2Lm 20-4) and anti-CD20 antibody V_{L} (2Lm 20-4). The invention comprehends PIMS having a single specific binding domain, by analogy to camelid antibody organization, as well as the more conventional pairing of heavy and light chains for those specific binding domains derived from antibodies. In the latter organization, part or all of a V_{L} domain and part or all of a V_{H} domain are contemplated, provided that the PIMS molecule retains the capacity to specifically bind to a binding partner. Moreover, the V_{L} and V_{H} may be arranged in either orientation and may be separated by at least about 5-8 amino acids using a linker peptide as disclosed herein or any other amino acid sequence capable of providing a spacer function compatible with interaction of the two domains of a PIMS having two such domains, or a multiple thereof. Multi-specific PIMS will have at least two specific binding domains, by analogy to camelid antibody organization, or at least four specific binding domains, by analogy to the more conventional mammalian antibody organization of paired V_{H} and V_{L} chains. In addition, the PIMS proteins may be a specific binding protein, as described above, further comprising a hinge disposed N-terminal to the constant sub-region. In some embodiments, the hinge comprises the same sequence as the PIMS linker disposed between the constant sub-region and the specific binding domain. In some embodiments, the PIMS specific binding protein further comprises at least a second specific binding domain disposed C-terminal to the constant sub-region, and the plurality of specific binding domains may bind to the same or different targets.

[0037] Another aspect of the invention is drawn to a method of producing the specific binding protein described herein comprising contacting a cell comprising a polynucleotide encoding the specific binding protein and a culture medium; and incubating the cell in the culture medium under conditions suitable for expression of the polynucleotide.

[0038] Yet another aspect of the invention is a method of treating a condition selected from the group consisting of cancer, inflammation and an autoimmune disorder comprising administering an effective amount of a specific binding protein described herein to an organism in need. A preferred organism for treatment is a human. A related aspect of the invention is a use of a specific binding protein as described above in the preparation of a medicament for the treatment of a condition selected from the group consisting of cancer, inflammation an autoimmune disorder. It is contemplated that the medicament may be suitable for administration to a vertebrate such as a mammal, e.g., a human.

[0039] Another aspect of the invention is a method of ameliorating a symptom of a condition selected from the group consisting of cancer, inflammation and an autoimmune disorder comprising administering an effective amount of a specific binding protein as described herein to an organism in need. Again, a preferred organism is a human. A related aspect of the invention is a use of a specific binding protein as described above in the preparation of a medicament for ameliorating a symptom of a condition selected from the group consisting of cancer, inflammation an autoimmune disorder. It is contemplated that the medicament may be suitable for administration to a vertebrate such as a mammal, e.g., a human.

[0040] Still another aspect of the invention is a use of a specific binding protein as described herein in the preparation of a medicament for the treatment of a disorder selected from the group consisting of cancer, inflammation and an autoimmune disorder. Other features and advantages of the present invention will be better understood by reference to the following detailed description, including the examples.

### BRIEF DESCRIPTION OF THE DRAWING

[0041] FIG. 1 presents a schematic illustration of the structure of a specific binding protein with effector function, or PIMS peptide.

[0042] FIG. 2 shows a graph of comparative PIMS (W0001), SMIP (2Lm20-4 binding CD20) and Scorpion (SO129, a CD20×CD20 multi-specific binding protein) binding in a CD16 (high affinity) binding ELISA assay revealing mean fluorescent intensity of bound protein as a function of protein concentration.

[0043] FIG. 3 is a graph of comparative PIMS (W0001), SMIP (2Lm20-4) and Scorpion (SO129) binding in a CD16 (low affinity) binding ELISA assay revealing mean fluorescent intensity of bound protein as a function of protein concentration.

[0044] FIG. 4 shows a graph of comparative binding of PIMS (W001) and SMIP (2E12) to human peripheral CD3+ T-cells.

[0045] FIG. 5 shows the mean fluorescence intensity of FITC F′2 GAH (goat anti-human secondary antibody) staining of PE (phycoerythrin)-labeled CD3+lymphocytes by peripheral blood mononuclear cells incubated with the 2E12 SMIP, the 2E12 PIMS, or PE CD3+ and GAH alone. Mean fluorescence intensity was graphed as a function of the concentration of reagent sample (2E12 SMIP, 2E12 PIMS or controls (combination of PE-conjugated anti-CD3 antibody (BD Pharmingen) and goat anti-human secondary antibody) being assayed.

[0046] FIG. 6 shows the binding of PIMS to WIL2-S cells. Binding was measured as geometric or geo mean fluorescence intensity as a function of the concentration of PIMS (ug/ml). Solid square: TRU-015 (an anti-CD20 SMIP), open square: 2Lm20-4-scc, solid upright triangle: 2Lm20-4HL17, 2Lm20-4HL12, open upright triangle: PIMS20-17, and open diamond: PIMS20-12.

[0047] FIG. 7 shows the effect of PIMS linkers on anti-DR PIMS binding to Wil2-S cells. Binding was measured as geo mean fluorescence intensity as a function of protein concentration (ug/ml) exposed to 500,000 cells. Solid diamond: M0019 (a DR SMIP), solid square: W0035 PIMS, solid upright triangle: W0036 PIMS, and “X”: W0056 PIMS.

[0048] FIG. 8 shows the percent of maximal binding to Ramos cells (% maximum binding) as a function of the concentration (nM) of anti-CD37 PIMS molecules contacting the cells. Solid square: TRU-016, an anti-CD37 SMIP, solid upright triangle: W0012 (25-amino-acid PIMS linker based on H7), solid inverted triangle: W0023 (10-amino-acid PIMS linker based on H7), solid diamond: W0024 (15-amino-acid PIMS linker based on H7), solid circle: W0025 (20-amino-acid PIMS linker based on H7), open square: W0094 (25-amino-acid PIMS linker based on H65), open upright triangle: W0095 (10-amino-acid PIMS linker based on H65), open inverted triangle: W0096 (15-amino-acid PIMS linker based on H65), and open circle: W0097 (20-amino-acid PIMS linker based on H65).

[0049] FIG. 9 shows the binding of various PIMS molecules and SMIPs to Ramos B-cells, as revealed by the mean fluorescence intensity following fluorescence labeling using an enzyme-conjugated secondary antibody. Open square: aHer2 (anti-Her2), solid square: TRU-016 (an anti-CD37 SMIP), W0028 (a mouse anti-CD37 PIMS), open diamond: W0029 (a hemi-humanized anti-CD19 PIMS), solid diamond: W0030-HD37 (a mouse anti-CD19), and solid circle: W0031-4G7 (a mouse anti-CD19).

[0050] FIG. 10 shows the binding of anti-CD28 PIMS to Jurkat T-cells. Binding was measured by the mean fluorescence intensity and the MFI was plotted as a function of the concentration of protein (ug/ml). Solid diamond: W0001 (H7 PIMS linker), solid square: W0050 (H9 PIMS linker), solid upright triangle: W0051 (H47 PIMS linker), square with corner projections: W0052, square with corner projections and projection top-center: W0053 (H62 PIMS linker), solid circle: W0083 (H65 PIMS linker), and solid square with vertical tick mark through square center: anti-CD28 SMIP.

[0051] FIG. 11 shows the binding of CD16Lo to CAS PIMS bound to Ramos cells. The Geo mean fluorescence intensity as a function of the concentration of PIMS is shown. Diamond (1): TRU-016 (an anti-CD37 SMIP), square (2): W0012, upright triangle (3): W0023, X-mark (4): W0024, asterisk (5): W0025, diamond (6): W0094, vertical tick mark (7): W0095, small rectangle (8): W0096, and large rectangle (9): W0097.

[0052] FIG. 12 shows anti-CD20 PIMS-mediated ADCC of BJAB B-cells. The percent specific BJAB B-cell killing as a function of the concentration of PIMS is plotted. Blue diamond: W0008 (10-amino-acid PIMS linker), red circle: W0009 (15-amino-acid PIMS linker), green upright triangle: 2Lm20-4 SMIP, black circle: medium.

[0053] FIG. 13 shows anti-CD28 PIMS-mediated ADCC of Jurkat T-cells. The percent specific Jurkat T-cell killing as a function of the concentration of PIMS is shown. Diamond: W0001 (anti-CD28 PIMS), square: 2E121g (an anti-CD28 SMIP), triangle: 2E12 N297D Ig (a variant anti-CD28 SMIP), and circle: media.

[0054] FIG. 14 shows anti-DR PIMS-mediated ADCC of BJAB B-cells. The percent specific BJAB B-cell killing as aufunction of the concentration of PIMS is provided. Diamond: M0019 (F3.3 SMIP), square: W0035 (F3.3H7 PIMS), triangle: W0036 (F3.3 NKG2A PIMS), W0056 (F3.3 NKG2A cys K/O PIMS), square with dased line: rituximab, and square without connecting line: media.

[0055] FIG. 15 shows the anti-CD37 PIMS-mediated ADCC of BJAB B-cells. The percent specific cell killing was measured as a function of protein concentration (nM). Diamond: W0012 (H7 PIMS linker), square: W0094 (H65 PIMS linker), upright triangle: TRU-016 (an anti-CD37 SMIP), circle with dashed line: rituximab, and circle with solid line: media.

[0056] FIG. 16 shows PIMS-mediated CDC of Ramos B-cells in the presence of human serum. The percent propidium iodide (PI) positive cells as a function of the concentration (ug/ml) of PIMS was plotted. Diamond: 2Lm20-4 SMIP (humanized anti-CD20 SMIP), square: W0008 (10-amino-acid PIMS linker; HL binding domain orientation), upright triangle: W0009 (15-amino-acid PIMS linker; HL binding domain orientation), solid circle: TRU-015 (an anti-CD20 SMIP), and open circle: media.

[0057] FIG. 17 shows that anti-DR PIMS inhibit ATP release in DHL-6 B-cells. Relative Luminescence Unit (RLU) was measured as a function of protein concentration (ug/ml). Solid diamond: F3.3 SMIP+GAH (goat anti-human secondary antibody), open square: F3.3H7 PIMS+GAH, open upright triangle: F3.3 NKG2A PIM+GAH, solid circle: TDR31.1 monoclonal antibody+GAM (goat anti-mouse secondary antibody), solid upright triangle: GAM (3:1), solid square:GAH (3:1), and open circle: medium.

[0058] FIG. 18 shows the binding of anti-Her2 PIMS to SKBR3 cells. Binding was measured as mean fluorescence intensity as a function of the concentration of protein (ug/ml). Solid diamond: W0042 PIMS, solid square: W0044 PIMS, solid upright triangle: W0045 PIMS, solid large square: W0041 PIMS, and solid large square: Her033 SMIP.

[0059] FIG. 19 shows the binding of anti-Her2 PIMS to MDA-MB453 cells. Binding was measured as mean fluorescence intensity as a function of the concentration of protein (ug/ml). Solid diamond: HerO33 SMIP, solid small square: W0042, solid upright triangle: W0057, solid large square: control.

### DETAILED DESCRIPTION OF THE INVENTION

[0060] The invention provides molecules that combine a capacity to specifically bind a given target, such as a target on an undesirable cell (e.g., a cancer cell or a cell involved in inflammation or autoimmune disorders), with an antibody effector-like activity in a manner that places a constant sub-region towards the N-terminus of the molecule and the specific binding domain towards the C-terminus of the molecule, with a (typically hinge-like) PIMS linker region joining the specific binding domain and the constant sub-region, the linker region optionally containing at least one cysteine capable of forming at least one disulfide bond. The effector-like functions include ADCC (antibody-dependent cellular cytotoxicity) and CDC (complement-dependent cytotoxicity), thus associating cytotoxicity with deleterious cells (e.g., cancer cells and cells causing or exacerbating inflammation or autoimmune disorders). The molecules are effective in that activity is not lost by placing the constant sub-region towards the N-terminus, with the C-terminus of the constant sub-region in peptide linkage to the remainder of the molecule, unlike any antibody organization found in nature, where the constant region is located at the C-terminus of the molecule. The molecules also are typically smaller than native antibodies and similar polypeptides, thus potentially improving the penetrance of the molecule, herein referred to as a reverse Small Modular ImmunoPharmaceutical (i.e., SMIP) or PIMS molecule. Notably, the small size does not compromise the in vivo persistence of PIMS as is found for other small peptide molecules contemplated for administration to organisms. Without wishing to be bound by any theory, the presence of the constant sub-region may contribute to the in vivo durability of the molecules.

[0061] The schematic structure of an exemplary PIMS molecule is indicated in FIG. 1. In general, a PIMS molecule is a single-chain polypeptide comprising, in N-terminal to C-terminal orientation, a constant sub-region derived from an immunoglobulin(s) that includes a C_{H2} and C_{H3} domain from the same (preferred) or different animal species, immunoglobulin isotype and/or immunoglobulin sub-class, a PIMS linker peptide that is typically a hinge region derived from an immunoglobulin, and a specific binding domain from a peptide member of a specific binding pair, which includes one or more regions derivable from the peptide member that collectively contribute to a functional binding domain. In some embodiments, the PIMS molecule further contains an N-terminally disposed hinge region derivable from an immunoglobulin, and the N-terminal hinge region may be the same as, or different than, the PIMS linker region found between the constant sub-region and the binding domain. Still further, a PIMS molecule may contain an N-terminal leader sequence useful in polypeptide production, and that leader sequence may include amino acids encoded by engineered restriction endonuclease cleavage sites found in an encoding nucleic acid. Thus, exemplary schematic organizations of some PIMS molecules include the following: N-constant sub-region-PIMS linker-binding domain-C, N-hinge-constant sub-region-PIMS linker-binding domain-C, N-leader-constant sub-region-PIMS linker-binding domain-C, or N-leader-hinge-constant sub-region-PIMS linker-binding domain-C. The functional components of PIMS molecules will now be described in greater detail.

[0062] The invention also provides compositions comprising a polynucleotide encoding a PIMS along with a vector comprising such a polynucleotide and a host cell comprising such a polynucleotide or vector, methods of making such molecules, preferably through recombinant protein production methods, but also through chemical syntheses in view of the relatively small size of the proteins. Further, the invention provides methods of treating disorders such as cancer, inflammation and autoimmune disorders, as well as related methods of ameliorating a symptom of such disorders.

[0063] Provided with such molecules, and the methods of recombinantly producing them in vivo, new approaches to targeted diagnostics and therapeutics have become available that allow, e.g., for the targeted recruitment of effector cells of the immune system (e.g., cytotoxic T lymphocytes, natural killer cells, and the like) to cells, tissues, agents and foreign objects to be destroyed or sequestered, such as cancer cells and infectious agents. In addition to localizing therapeutic cells to a site of treatment, the peptides are useful in localizing therapeutic compounds, such as radiolabeled proteins. Further, the peptides are also useful in scavenging deleterious compositions, for example by associating a deleterious composition, such as a toxin, with a cell capable of destroying or eliminating that toxin (e.g., a macrophage). The molecules of the invention are useful in modulating the activity of binding partner molecules, such as cell surface receptors. Diseases and conditions where the elimination of defined cell populations is beneficial would include infectious and parasitic diseases, inflammatory and autoimmune conditions, malignancies, and the like. Further consideration of the disclosure of the invention will be facilitated by a consideration of the following express definitions of terms used herein.

[0064] A “single-chain binding protein” is a single contiguous arrangement of covalently linked amino acids, with the chain capable of specifically binding, as a monomer and/or multimer, to one or more binding partners sharing sufficient determinants of a binding site to be detectably bound by the single-chain binding protein. Exemplary binding partners include proteins, carbohydrates, lipids and small molecules.

[0065] For ease of exposition, “derivatives” and “variants” of proteins, polypeptides, and peptides according to the invention are described in terms of differences from proteins and/or polypeptides and/or peptides according to the invention, meaning that the derivatives and variants, which are proteins/polypeptides/peptides according to the invention, differ from underivatized or non-variant proteins, polypeptides or peptides of the invention in the manner defined. One of skill in the art would understand that the derivatives and variants themselves are proteins, polypeptides and peptides according to the invention.

[0066] An “antibody” is given the broadest definition consistent with its meaning in the art, and includes proteins, polypeptides and peptides capable of binding to at least one binding partner, such as a proteinaceous or non-proteinaceous antigen. An “antibody” as used herein includes members of the immunoglobulin superfamily of proteins, of any species, of single- or multiple-chain composition, and variants, analogs, derivatives and fragments of such molecules. Specifically, an “antibody” includes any form of antibody known in the art, including but not limited to, monoclonal and polyclonal antibodies, chimeric antibodies, CDR-grafted antibodies, humanized antibodies, human antibodies, single-chain variable fragments, bi-specific antibodies, diabodies, antibody fusions, and the like.

[0067] A “binding domain” is a peptide region, such as a fragment of a polypeptide derived from an immunoglobulin (e.g., an antibody), that specifically binds one or more specific binding partners. If a plurality of binding partners exists, those partners share binding determinants sufficient to detectably bind to the binding domain. Preferably, the binding domain is a contiguous sequence of amino acids.

[0068] An “epitope” is given its ordinary meaning herein of a single antigenic site, i.e., an antigenic determinant, on a substance (e.g., a protein) with which an antibody specifically interacts, for example by binding. Other terms that have acquired well-settled meanings in the immunoglobulin (e.g., antibody) art, such as a “variable light region,” variable heavy region,” “constant light region,” constant heavy region,” “antibody hinge region,” “complementarity determining region,” “framework region,” “antibody isotype,” “Fc region,” “constant region,” “single-chain variable fragment” or “scFv,” “diabody,” “chimera,” “CDR-grafted antibody,” “humanized antibody,” “shaped antibody,” “antibody fusion,” and the like, are each given those well-settled meanings known in the art, unless otherwise expressly noted herein.

[0069] Terms understood by those in the art as referring to antibody technology are each given the meaning acquired in the art, unless expressly defined herein. Examples of such terms are “V_{L}” and “V_{H}”, referring to the variable binding region derived from an antibody light and heavy chain, respectively; and C_{L} and C_{H}, referring to an “immunoglobulin constant region,” i.e., a constant region derived from an antibody light or heavy chain, respectively, with the latter region understood to be further divisible into C_{H1}, C_{H2}, C_{H3} and C_{H4} constant region domains, depending on the antibody isotype (IgA, IgD, IgE, IgG, IgM) from which the region was derived. CDR means “complementarity determining region.” A “hinge region” is derived from the amino acid sequence interposed between, and connecting, the C_{H1} and C_{H2} regions of a single chain of an antibody, which is known in the art as providing flexibility, in the form of a “hinge,” to whole antibodies.

[0070] A “constant sub-region” is a term defined herein to refer to a peptide, polypeptide, or protein sequence that corresponds to, or is derived from, part or all of one or more constant region domains, but not all constant region domains, of the source/parent antibody to which the constant sub-region polypeptide corresponds. Thus, a constant sub-region may include part or all of any of the following domains: a C_{H2} domain, a C_{H3} domain (IgA, IgD, IgG, IgE, or IgM), and a C_{H4} domain (IgE or IgM). A constant sub-region as defined herein, therefore, can refer to a polypeptide that corresponds to a portion of an immunoglobulin constant region, provided it retains at least one effector function associated with an antibody. Typically, a constant sub-region of a polypeptide, or encoding nucleic acid, of the invention has a C_{H2} domain and C_{H3} domain, although a PIMS molecule may optionally have an N-terminal hinge region linked to the constant sub-region. In some embodiments, the constant sub-region is disposed N-terminal to the one or more specific binding domains of the molecule. Although there may be some sequence N-terminal to the constant sub-region, such as the N-terminal hinge noted above, in these embodiments there is no specific binding domain N-terminal to the constant sub-region.

[0071] An “effector function” is a function associated with or provided by a constant region of an antibody. Exemplary effector functions include antibody-dependent cell-mediated cytotoxicity (ADCC), complement activation and complement-dependent cytotoxicity (CDC), F_{C} receptor binding, and increased plasma half-life, as well as placental transfer. An effector function of a composition according to the invention is provided by the constant sub-region and is detectable; preferably, the specific activity of the composition according to the invention for that function is about the same as the specific activity of a wild-type antibody with respect to that effector function, i.e., the constant sub-region of the PIMS molecule preferably has not lost any effector function relative to a wild-type antibody.

[0072] A “linker” is a peptide, or polynucleotide, that joins or links other peptides or polynucleotides. Typically, a peptide linker is an oligopeptide of from about 2-50 amino acids, with typical polynucleotide linkers encoding such a peptide linker and, thus, being about 6-150 nucleotides in length. A PIMS linker is a type of peptide linker that joins an immunoglobulin-derived constant subregion to a binding domain, or to the binding domain located closest to the N-terminus of the specific binding peptide when more than one binding domain is present. This PIMS linker has an amino acid sequence derived from an antibody hinge region, or derived from a region linking a binding domain, or derived from a region linking a binding domain to a cell surface transmembrane region or membrane anchor. In some embodiments, the PIMS linker has at least one cysteine residue capable of participating in at least one disulfide bond under standard peptide conditions (e.g., physiological conditions, conventional peptide purification conditions, conventional conditions for peptide maintenance or storage, and the like). Preferably, the disulfide bond(s) formed by these cysteine(s) are inter-chain disulfide bonds. Binding domain linkers, which may be the same or different from the above-described linker interposed between the constant subregion and the N-terminal specific binding domain, may themselves be interposed between all binding domains in a protein containing more than one binding domain. Exemplary binding domain linkers are peptides belonging to the (Gly4Ser)n family where, preferably, n=1-5.

[0073] A “target” is given more than one meaning, with the context of usage defining an unambiguous meaning in each instance. In its narrowest sense, a “target” is a binding site, i.e., the binding domain of a binding partner for a peptide composition according to the invention. In a broader sense, “target” or “molecular target” refers to the entire binding partner (e.g., a protein), which necessarily exhibits the binding site. Specific targets, such as “CD20,” “CD37,” and the like, are each given the ordinary meaning the term has acquired in the art. A “target cell” is any prokaryotic or eukaryotic cell, whether healthy or diseased, that is associated with a target molecule according to the invention. Of course, target molecules are also found unassociated with any cell (i.e., a cell-free target) or in association with other compositions such as viruses (including bacteriophage), organic or inorganic target molecule carriers, and foreign objects.

[0074] Examples of materials with which a target molecule may be associated include autologous cells (e.g., cancer cells or other diseased cells), infectious agents (e.g., infectious cells and infectious viruses), and the like. A target molecule may be associated with an enucleated cell, a cell membrane, a liposome, a sponge, a gel, a capsule, a tablet, and the like, which may be used to deliver, transport or localize a target molecule, regardless of intended use (e.g., for medical treatment, as a result of benign or unintentional provision, or to further a bioterrorist threat). “Cell-free,” “virus-free,” “carrier-free,” “object-free,” and the like refer to target molecules that are not associated with the specified composition or material.

[0075] “Binding affinity” refers to the strength of non-covalent binding of the peptide compositions of the invention and their binding partners. Preferably, binding affinity refers to a quantitative measure of the attraction between members of a binding pair.

[0076] An “adjuvant” is a substance that increases or aids the functional effect of a compound with which it is in association, such as in the form of a pharmaceutical composition comprising an active agent and an adjuvant. An “excipient” is an inert substance used as a diluent in formulating a pharmaceutical composition. A “carrier” is a typically inert substance used to provide a vehicle for delivering a pharmaceutical composition.

[0077] “Host cell” refers to any cell, prokaryotic or eukaryotic, in which is found a polynucleotide, protein or peptide according to the invention.

[0078] “Introducing” a nucleic acid or polynucleotide into a host cell means providing for entry of the nucleic acid or polynucleotide into that cell by any means known in the art, including but not limited to, in vitro salt-mediated precipitations and other forms of transformation or transfection of naked nucleic acid/polynucleotide or vector-borne nucleic acid/polynucleotide, virus-mediated infection and optionally transduction, with or without a “helper” molecule, ballistic projectile delivery, conjugation, and the like.

[0079] “Incubating” a host cell means maintaining that cell under environmental conditions known in the art to be suitable for a given purpose, such as gene expression. Such conditions, including temperature, ionic strength, oxygen tension, carbon dioxide concentration, nutrient composition, and the like, are well known in the art.

[0080] “Isolating” a compound, such as a protein or peptide according to the invention, means separating that compound from at least one distinct compound with which it is found associated in nature, such as in a host cell expressing the compound to be isolated, e.g. by isolating spent culture medium containing the compound from the host cells grown in that medium.

[0081] An “organism in need” is any organism at risk of, or suffering from, any disease, disorder or condition that is amenable to treatment or amelioration with a composition according to the invention, including but not limited to any of various forms of cancer, any of a number of autoimmune diseases, radiation poisoning due to radiolabeled proteins, peptides and like compounds, ingested or internally produced toxins, and the like, as will become apparent upon review of the entire disclosure. Preferably, an organism in need is a human patient.

[0082] “Ameliorating” a symptom of a disease means detectably reducing the severity of that symptom of disease, as would be known in the art. Exemplary symptoms include pain, heat, swelling and joint stiffness.

[0083] Unless clear from context, the terms “protein,” “peptide,” and “polypeptide” are used interchangeably herein, with each referring to at least one contiguous chain of amino acids. Analogously, the terms “polynucleotide,” “nucleic acid,” and “nucleic acid molecule” are used interchangeably unless it is clear from context that a particular, and non-interchangeable, meaning is intended.

[0084] “Pharmaceutically acceptable salt” refers to salts of the compounds of the present invention derived from the combination of such compounds and an organic or inorganic acid (acid addition salts) or an organic or inorganic base (base addition salts).

[0085] In some embodiments, polynucleotides useful in the recombinant expression of a PIMS molecule will encode a leader peptide linked to an N-terminal hinge region (e.g., the IgG1 hinge) by sequences encoding varying short di- or tri-peptides that include the sequences of restriction endonuclease cleavage sites useful in recombinant DNA engineering of the molecules, such as an AgeI site (e.g., at the end of a leader-encoding sequence) and an XhoI site (e.g., at the beginning of a sequence encoding a hinge such as an IgG1 hinge) followed by the hinge (e.g., SCC-P), C_{H2} and C_{H3} domains (e.g., IgG1 domains) fused to an scFv by a (hinge-like) PIMS linker such as the H7 Scorpion linker (having an amino acid sequence of SEQ ID NO:164 encoded, e.g., by SEQ ID NO:163). In this way, a PIMS molecule can be seen to resemble a “backwards” SMIP at a crude structural level, although a PIMS molecule typically contains two hinge-like disulfide bonding regions, one N-terminal and the other lying between the end of the effector domain and the specific binding domain or domains.

### PIMS Binding Domain

[0086] A PIMS protein or polypeptide has a structure unlike the structure of other specific binding molecules, such as polyclonal or monoclonal antibodies, fragments thereof such as Fab, F(ab′)₂, or scFv, SMIPs, diabodies, scorpions, and the like. A PIMS protein or polypeptide contains an effector domain (C_{H2}-C_{H3}, optionally hinge—C_{H2}-C_{H3}), at the N-terminus and a target-specific (e.g., antigen-specific) binding domain at the C-terminus with both domains separated by a (hinge-like) PIMS linker. Where the PIMS linker is derived from an Ig hinge, it is preferably derived from the same antibody class, isotype, or sub-isotype as at least one of the C_{H2} and C_{H3} domains of that PIMS molecule. The target-specific binding domain may be a single domain, e.g., a binding domain derived from a camelid antibody binding domain, or more typically, a plurality of regions may associate to form at least one binding domain, such as the inter- or intra-chain association of a V_{L}-like domain and a V_{H}-like domain. A PIMS structure allows optimization of both effector function and the functional characteristics of the binding domain. These molecules have activity on their own as well as offering a platform for assessing a binding domain of a multi-specific binding protein, such as the C-terminal binding domain of a Scorpion (i.e., a Scorpion binding domain 2 (BD2)), as well as for assessing the effector domain-BD2 Scorpion linker.

[0087] The specific binding domain may be derived from one or more regions of a protein or polypeptide member of a specific binding pair. Typically, a binding domain is derived from at least one region of the same, or different, immunoglobulin protein structures such as antibody molecules. The specific binding domain may exhibit a sequence identical to the sequence of a region of an immunoglobulin, or may be a modification of such a sequence to provide, e.g., altered binding properties or altered stability. Such modifications are known in the art and include alterations in amino acid sequence that contribute directly to the altered property such as altered binding, for example, by leading to an altered secondary or higher order structure for the peptide. Also contemplated are modified amino acid sequences resulting from the incorporation of non-native amino acids, such as non-native conventional amino acids, unconventional amino acids and imino acids. In some embodiments, the altered sequence results in altered post-translational processing, leading, for example, to an altered glycosylation pattern.

[0088] For embodiments in which a binding domain is derived from more than one region of an immunoglobulin (e.g., an Ig V_{L} region and an Ig V_{H} region), the plurality of regions may be joined by a linker peptide, which is described below. The structures of exemplary, but non-limiting, binding domains suitable for use in the compositions of the invention are provided in Table 1.

TABLE 1

| | | Sequence Identifier |
|---|---|---|
| | Exemplary molecule comprising | (exemplary encoding |
| Binding domain | domain | nucleic acid) |
| Anti-CD20 variable | 2H7 (H₃N-VL-VH-CO₂H orientation) | 120 (119) |
| region | | |
| Anti-CD20 (2Lm20-4) | 2Lm20-4 (H₃N-VH-VL-CO₂H orientation) | 122 (121) |
| HL 12 | | |
| Anti-CD20 (2Lm20-4) | 2Lm20-4 (H₃N-VH-VL-CO₂H orientation) | 124 (123) |
| HL 17 | | |
| Anti-CD28 variable | 2E12 (H₃N-VL-VH-CO₂H orientation) | 126 (125) |
| region | | |
| Anti-CD28 variable | 2E12 (H₃N-VH-VL-CO₂H orientation) | 128 (127) |
| region | | |
| Anti-CD37 variable | G28-1 (H₃N-VL-VH-CO₂H orientation) | 130 (129) |
| domain | | |
| Anti-CD37 variable | G28-1 (H₃N-VH-VL-CO₂H orientation) | 132 (131) |
| domain | | |
| Anti-CD3 variable | G19-4 (H₃N-VL-VH-CO₂H orientation) | 134 (133) |
| domain | | |
| Anti-CD3 variable | G19-4 (H₃N-VH-VL-CO₂H orientation) | 136 (135) |
| domain | | |

### PIMS Constant Sub-Region

[0089] The constant sub-region, disposed towards or at the N-terminus of the polypeptide, is derived from a constant region of an immunoglobulin protein. The constant sub-region generally is derived from part, but not all, of a constant heavy chain region of an immunoglobulin. Typically, the constant sub-region contains a hinge-CH₂ portion of a C_{H} region of an immunoglobulin, although it may be derived from a hinge-C_{H2}-C_{H3} portion or it may be derived from a hinge-partial C_{H2} portion of a C_{H} region, provided the constant sub-region retains at least one effector function associated with an antibody. Also, portions of the constant sub-region may be derived from the C_{H} regions of different immunoglobulins. In preferred embodiments, a hinge and C_{H2} region, as well as a C_{H3} region where relevant, are derived from the same antibody isotype. Further contemplated are molecules having an N-terminal leader sequence joined to a constant subregion or an N-terminal hinge. The constant sub-region provides at least one activity associated with a C_{H} region of an immunoglobulin, such as one or more of the following effector functions: antibody-dependent cell-mediated cytotoxicity (ADCC), complement-dependent cytotoxicity (CDC), protein A binding, binding to at least one Fc receptor, reproducibly detectable stability relative to a protein according to the invention except for the absence of a constant sub-region, and perhaps placental transfer where generational transfer of a molecule according to the invention would be advantageous, as recognized by one of skill in the art. Constant sub-regions suitable for use in the compositions of the invention include, but are not limited to, the structures exemplified in Table 2. The constant sub-region is derived from at least one immunoglobulin molecule and exhibits an identical or substantially identical amino acid sequence to a region or regions of at least one immunoglobulin. In some embodiments, the constant sub-region is modified from the sequence or sequences of at least one immunoglobulin (by substitution of one or more non-native conventional or unconventional, e.g., synthetic, amino acids or imino acids), resulting in a primary structure that may yield an altered secondary or higher order structure with altered properties associated therewith, or may lead to alterations in post-translational processing, such as glycosylation.

[0090] Exemplary modified constant sub-regions are illustrated in Table 2 and include hIgG1 (P238S)-C_{H2}C_{H3} (SEQ ID NO:142, encoded e.g., by SEQ ID NO:141), hIgG1 (P331S)-C_{H2}C_{H3} (SEQ ID NO:144 encoded, e.g., by SEQ ID NO:143) and hIgG1 (P238S/P331S)-C_{H2}C_{H3} (SEQ ID NO:146 encoded, e.g., by SEQ ID NO:145). Note that “P238S” refers to the substitution of a Pro residue by a Ser residue at position 238 using the Kabat numbering system. The 238 position (Kabat) is at position 8 of SEQ ID NOS:142 and 146, and codons encoding the position 8 (Kabat 238) residue are found at the corresponding positions in exemplary encoding nucleic acids (SEQ ID NOS:141 and 145). Analogously, the P331S substitution is at position 331 (Kabat), which is at position 101 of SEQ ID NO:144 and 146, with cognate codons at corresponding locations in exemplary encoding nucleic acids (SEQ ID NOS:143 and 145).

[0091] For those binding domains and constant sub-regions exhibiting an identical or substantially identical amino acid sequence to one or more immunoglobulin polypeptides, the post-translational modifications of the molecule according to the invention may result in a molecule modified relative to the immunoglobulin(s) serving as a basis for modification. For example, using techniques known in the art, a host cell may be modified, e.g., a CHO cell, in a manner that leads to an altered polypeptide glycosylation pattern relative to that polypeptide in an unmodified (e.g., CHO) host cell.

TABLE 2

| | Sequence Identifier (exemplary |
|---|---|
| Effector domain | encoding nucleic acid |
| hIgG1-C_{H2}C_{H3} | 140 (139) |
| hIgG1 (P238S)-C_{H2}C_{H3} | 142 (141) |
| hIgG1 (P331S)-C_{H2}C_{H3} | 144 (143) |
| hIgG1 (P238S/P331S)-C_{H2}C_{H3} | 146 (145) |

### PIMS Hinge Region

[0092] The actual structures of PIMS linker regions of typical PIMS molecules are provided in Table 3, wherein the amino acid sequence and, where applicable, an encoding polynucleotide sequence are provided for a non-limiting number of suitable regions. Typically, these PIMS linker regions are derived from the hinge region of an immunoglobulin. Also typically, the sequence of the PIMS linker includes a cysteine residue capable of forming a disulfide bond, and preferably an inter-chain disulfide bond, under standard peptide conditions. PIMS molecules comprising a hinge-like PIMS linker having at least one cysteine promote homodimerization and effector function. Unless otherwise indicated, sequences in Table 3 are from IgG1 hinge regions. There is potential for affecting ADCC and CDC activities through PIMS modifications, which is expected to include changes to either an N-terminal hinge (e.g., an IgG1 SCC-P hinge [SEQ ID NO:81]) or to a hinge-like PIMS linker separating the constant sub-region from the specific binding domain (e.g., a Scorpion linker (H7), SEQ ID NO:164, encoded by, e.g., SEQ ID NO:163). Variants have been constructed to optimize the region surrounding the signal sequence (leader) to direct post-translation cleavage to the N-terminus of the mature PIMS peptide during expression in COS-7 cells. Other variants are envisioned that would alter a sequence corresponding to the IgG1 upper hinge region in a manner that affected expression, aggregation and/or ADCC and/or CDC function. Further, alterations of the PIMS linker region interposed between the effector domain and specific binding domains are also contemplated to affect expression, aggregation and/or ADCC and/or CDC function, as well as to effect alterations in binding affinity to FcRs.

[0093] The PIMS linkers of Table 3 (i.e., hinges 1-26) are variants of the wild-type hinge also provided in that Table. Apparent from an inspection of the various sequences is that variants were created to lengthen or shorten the hinge, to alter the sequence to increase or decrease the probability of interchain bonding by adding or deleting Cys residues, and to alter the flexibility of the hinge by introducing flexibility-promoting residues (e.g., Gly) or flexibility-inhibiting residues (e.g., Pro). Comparing the wild-type IgG1 hinge of Table 3 with hinges 1-26 (see Dall'Acqua et al., J. Immunol. 177:1129-1138 (2006), incorporated herein by reference) revealed that hinges 11, 13, 14, and 17 exhibited lower binding affinity to FcγRIIIA than the wild-type hinge, while hinges 1-10, 12, 15-16, and 18-26 exhibited a binding affinity to FcγRIIIA that was comparable to the wild-type hinge. Accordingly, one of skill in the art would compare the sequences in Table 3 to design a hinge-like PIMS linker based on IgG1 hinge sequences known to exhibit an approximately wild-type binding affinity for FcγRIIIA or known to exhibit a lowered binding affinity for FcγRIIIA. That binding affinity, moreover, directly correlates with ADCC activity and, hence, one of skill would be able to design a PIMS linker region associated with an approximately wild-type level of ADCC activity, or a PIMS linker associated with less ADCC activity. In comparing sequences to finalize the design of a PIMS linker, or hinge, any one of a number of standard software programs and packages suitable for the purpose could be chosen to facilitate arrival at a suitable design, and such sequences are contemplated as components of the compositions of the invention.

[0094] Hinge-like PIMS linker regions having one of the sequences of Table 3 also exhibit varying levels of binding affinity for C1_{q} and, hence, varying level of complement-mediated cytotoxicity. Hinges 19, 21-22, and 24-25 exhibit a higher binding affinity for C1_{q} than the wild-type hinge; hinges 3-6, 11, 13-14, and 18 exhibit a lower binding affinity for Clq than the wild-type hinge; and hinges 1-2, 7-10, 12, 15-17, 20, 23, and 26 exhibit a binding affinity for C1_{q} that is comparable to the binding affinity of the wild-type hinge for that complement protein. Accordingly, relative to the CDC activity associated with the wild-type IgG1 hinge, hinges 19, 21-22, and 24-25 are associated with a higher CDC activity, hinges 3-6, 11, 13-14, and 18 are associated with a lower CDC activity, and hinges 1-2, 7-10, 12, 15-17, 20, 23, and 26 are associated with about the same level of CDC activity as the wild-type hinge. As in designing PIMS linkers or hinges for contributions to relative binding to FcγRIIIA and/or ADCC levels, one of skill in the art would know to compare the PIMS linker or hinge sequences disclosed herein and, based on the differing binding affinities for C1_{q} and/or differing levels of CDC, the design could be optimized to achieve a relative level of affinity for C1_{q} binding and/or CDC using well-known algorithms implemented in readily available software programs and packages. For some of the hinges described above, Dall'Acqua et al. confirmed the binding observations by determining dissociation constants. Hinges exhibiting lowered binding affinity for either FcγRIIIA or C1_{q} also exhibited higher K_{D}S for those molecules.

[0095] Changes are also contemplated in the specific binding domain(s) region, such as in an scFv linker region between the V_{H} and V_{L} domains, and these changes may be introduced into a PIMS molecule separately or in combination with the above variants in order to affect binding affinity, expression levels, aggregation tendencies or overall functionality of the molecule.

TABLE 3

| | | | SEQ ID NOS. |
|---|---|---|---|
| | | | (exemplary |
| | | | encoding |
| Hinge | | | nucleic |
| Region | Nucleotide Sequence | Amino Acid Sequence | acid) |
| ccc- | | | 63 |
| hIgG1 | | | |
| sss (s)- | gagcccaaatcttctgacaaaact | EPKSSDKTHTSPPSS | 89 (88) |
| hIgG1 | cacacatctccaccgagctca | | |
| csc (s)- | gagcccaaatcttgtgacaaaact | EPKSCDKTHTSPPCS | 91 (90) |
| hIgG1 | cacacatctccaccgtgctca | | |
| ssc (s)- | gagcccaaatcttctgacaaaact | EPKSSDKTHTSPPCS | 65 (64) |
| hIgG1 | cacacatctccaccgtgctca | | |
| scc (s)- | gagcccaaatcttctgacaaaact | EPKSSDKTHTCPPCS | 67 (66) |
| hIgG1 | cacacatgtccaccgtgctca | | |
| css (s)- | gagcccaaatcttgtgacaaaact | EPKSCDKTHTSPPSS | 69 (68) |
| hIgG1 | cacacatctccaccgagctca | | |
| scs (s)- | gagcccaaatcttgtgacaaaact | EPKSSDKTHTCPPSS | 71 (70) |
| hIgG1 | cacacatgtccaccgagctca | | |
| ccc (s)- | gagcccaaatcttgtgacaaaact | EPKSCDKTHTSPPCS | 73 (72) |
| hIgG1 | cacacatgtccaccgtgctca | | |
| ccc (p)- | gagcccaaatcttgtgacaaaact | EPKSCDKTHTSPPCP | 75 (74) |
| hIgG1 | cacacatgtccaccgtgccca | | |
| sss (p)- | gagcccaaatcttctgacaaaact | EPKSSDKTHTSPPSP | 77 (76) |
| hIgG1 | cacacatctccaccgagccca | | |
| csc (p)- | gagcccaaatcttgtgacaaaact | EPKSCDKTHTSPPCP | 62 (61) |
| hIgG1 | cacacatctccaccgtgccca | | |
| ssc (p)- | gagcccaaatcttctgacaaaact | EPKSSDKTHTSPPCP | 79 (78) |
| hIgG1 | cacacatctccaccgtgccca | | |
| scc (p)- | gagcccaaatcttctgacaaaact | EPKSSDKTHTCPPCP | 81 (80) |
| hIgG1 | cacacatgtccaccgtgccca | | |
| css (p)- | gagcccaaatcttgtgacaaaact | EPKSCDKTHTSPPSP | 83 (82) |
| hIgG1 | cacacatctccaccgagccca | | |
| scs (p)- | gagcccaaatcttgtgacaaaact | EPKSSDKTHTCPPSP | 85 (84) |
| hIgG1 | cacacatgtccaccgagccca | | |
| scppcp | agttgtccaccgtgccca | SCPPCP | 87 (86) |
| wild-type | | EPKSCDKTHTCPPCP | 92 |
| hinge | | | |
| hinge 1 | | GGGGCDKTHTCPPCP | 93 |
| hinge 2 | | EPKSCGGGGGCPPCP | 94 |
| hinge 3 | | EPKSCDKTHTCGGCP | 95 |
| hinge 4 | | EPKSCDKTHTCPPCG | 96 |
| hinge 5 | | EPKSCDKTHTCPPSP | 97 |
| hinge 6 | | EPKSCDKTHTSPPCP | 98 |
| hinge 7 | | EPKSCDKCHTCPPCP | 99 |
| hinge 8 | | EPKSCDKTCCCPPCP | 100 |
| hinge 9 | | EPKSCPPPPPCPPCP | 101 |
| hinge 10 | | PPPPCDKTHTCPPCP | 102 |
| hinge 11 | | EPKSCDKTHTC--CP | 103 |
| hinge 12 | | EPKSCDK--TCPPCP | 104 |
| hinge 13 | | EPKSCDK--TC--CP | 105 |
| hinge 14 | | EPKSCDKTHTCPGGGPCP | 106 |
| hinge 15 | | EPKSCDGGGKTHTCPPCP | 107 |
| hinge 16 | | EPKSCDPPPKTHTCPPCP | 108 |
| hinge 17 | | EPKSCDKTHTCPPPPPCP | 109 |
| hinge 18 | | EPKSCDKTHTCWWCP | 110 |
| hinge 19 | | EPKSCDWWHTCPPCP | 111 |
| hinge 20 | | EPKCSDKTHTCPPCP | 112 |
| hinge 21 | | EPKSDCKTHTCPPCP | 113 |
| hinge 22 | | EPKSDCWWHTCPPCP | 114 |
| hinge 23 | | EPKSCDFFHTCPPCP | 115 |
| hinge 24 | | EPKSCDWWWTCPPCP | 116 |
| hinge 25 | | EPKSCWWTHTCPPCP | 117 |
| hinge 26 | | EPWWCDKTHTCPPCP | 118 |

### PIMS Linker Peptide

[0096] PIMS linker peptides are frequently hinge regions and, therefore, any hinge region structure defined herein, including those hinge region structures exemplified in Table 3, are suitable for use as PIMS linker peptides. The PIMS linker peptides useful in the compositions of the invention are preferably between about 2-45 amino acids, or 2-38 amino acids, or 5-45 amino acids. For example, the H1 linker is 2 amino acids in length and the STD2 linker is 38 amino acids in length. Moreover, a PIMS linker may be used to join the specific binding domain to the constant sub-region and this PIMS linker may be derived from a hinge region of an immunoglobulin. Given the generally suitable length parameter provided herein, one of skill would be able to alter the sequence and/or length of a given PIMS linker peptide to achieve a desired level of flexibility and/or spacing of the constant sub-region and binding domain, for example to avoid steric hindrance. The structures of exemplary PIMS linker peptides include the hinge regions provided in Table 3 and the peptide linkers provided in Table 4.

TABLE 4

| | | | Sequence |
|---|---|---|---|
| | | | Identifier |
| | | | (exemplary |
| | | | encoding |
| Linker | Nucleotide Sequence | Amino Acid Sequence | nucleic acid) |
| STD1 | aattatggtggcggtggctcgggc | NYGGGGSGGGGSGGGGSGNS | 148 (147) |
| | ggtggtggatctggaggaggtggg | | |
| | agtgggaattct | | |
| STD2 | aattatggtggcggtggctcgggc | NYGGGGSGGGGSGGGGSGNYGGGG | 150 (149) |
| | ggtggtggatctggaggaggtggg | SGGGGSGGGGSGNS | |
| | agtgggaattatggtggcggtggc | | |
| | tcgggcggtggtggatctggagga | | |
| | ggtgggagtgggaattct | | |
| H1 | aattct | NS | 152 (151) |
| H2 | ggtggcggtggctcggggaattct | GGGGSGNS | 154 (153) |
| H3 | aattatggtggcggtggctctggg | NYGGGGSGNS | 156 (155) |
| | aattct | | |
| H4 | ggtggcggtggctcgggcggtggt | GGGGSGGGGSGNS | 158 (157) |
| | ggatctgggaattct | | |
| H5 | aattatggtggcggtggctcgggc | NYGGGGSGGGGSGNS | 160 (159) |
| | ggtggtggatctgggaattct | | |
| H6 | ggtggcggtggctcgggcggtggt | GGGGSGGGGSGGGGSGNS | 162 (161) |
| | ggatctgggggaggaggcagcggg | | |
| | aattct | | |
| H7 | gggtgtccaccttgtccgaattct | GCPPCPNS | 164 (163) |
| H8 | gggtctccaccttctccgaattct | GSPPSPNS | 166 (165) |
| H9 | tctccaccttctccgaattct | SPPSPNS | 168 (167) |
| H11 | gagcccacatctaccgacaaaact | EPTSTDKTHTSPPSPNS | 172 (171) |
| | cacacatctccacccagcccgaat | | |
| | tct | | |
| H12 | gagcccacatctaccgacaaaact | EPTSTDKTHTCPPCPNS | 174 (173) |
| | cacacatctccacccagcccgaat | | |
| | tct | | |
| H13 | gagcccacatctaccgacaaaact | EPKSSDKTHTCPPCPNS | 176 (175) |
| | cacacatctccacccagcccgaat | | |
| | tct | | |
| H15 | ggcggtggtggctcctgtccacct | GGGGSCPPCPNS | 180 (179) |
| | tgtccgaattct | | |
| H16 | ctgtctgtgaaagctgacttcctc | LSVKADFLTPSIGNS | 182 (181) |
| | actccatccatcgggaattct | | |
| H17 | ctgtctgtgaaagctgacttcctc | LSVKADFLTPSISCPPCPNS | 184 (183) |
| | actccatccatctcctgtccacct | | |
| | tgcccgaattct | | |
| H18 | ctgtctgtgctcgctaacttcagt | LSVLANFSQPEIGNS | 186 (185) |
| | cagccagagatcgggaattct | | |
| H19 | ctgtctgtgctcgctaacttcagt | LSVLANFSQPEISCPPCPNS | 188 (187) |
| | cagccagagatctcctgtccacct | | |
| | tgcccgaattct | | |
| H20 | ctgaaaatccaggagagggtcagt | LKIQERVSKPKISNS | 190 (189) |
| | aagccaaagatctcgaattct | | |
| H21 | ctgaaaatccaggagagggtcagt | LKIQERVSKPKISCPPCPNS | 192 (191) |
| | aagccaaagatctcctgtccacct | | |
| | tgcccgaattct | | |
| H22 | ctggatgtgagtgagaggcctttt | LDVSERPFPPHIQNS | 194 (193) |
| | cctccacacatccagaattct | | |
| H23 | ctggatgtgagtgagaggcctttt | LDVSERPFPPHIQSCPPCPNS | 196 (195) |
| | cctccacacatccagtcctgtcca | | |
| | ccttgcccgaattct | | |
| H24 | cgggaacagctggcagaggtcact | REQLAEVTLSLKANS | 198 (197) |
| | ttgagcttgaaagcgaattct | | |
| H25 | cgggaacagctggcagaggtcact | REQLAEVTLSLKACPPCPNS | 200 (199) |
| | ttgagcgtgaaagcttgtccaccc | | |
| | tgcccgaattct | | |
| H26 | cggattcaccagatgaactccgag | RIHQMNSELSVLANS | 202 (201) |
| | ttgagcgtgctcgcgaattct | | |
| H27 | cggattcaccagatgaactccgag | RIHQMNSELSVLACPPCPNS | 204 (203) |
| | ttgagcgtgctcgcttgtccaccc | | |
| | tgcccgaattct | | |
| H28 | gataccaaagggaagaacgtcctc | DTKGKNVLEKIFSNS | 206 (205) |
| | gagaagatcttctcgaattct | | |
| H29 | gataccaaagggaagaacgtcctc | DTKGKNVLEKIFDSCPPCPNS | 208 (207) |
| | gagaagatcttcgactcctgtcca | | |
| | ccttgcccgaattct | | |
| H30 | ctgccacctgagacacaggagagt | LPPETQESQEVTLNS | 210 (209) |
| | caagaagtcaccctgaattct | | |
| H31 | ctgccacctgagacacaggagagt | LPPETQESQEVTLSCPPCPNS | 212 (211) |
| | caagaagtcaccctgtcctgtcca | | |
| | ccttgcccgaattct | | |
| H32 | cggattcacctgaacgtgtccgag | RIHLNVSERPFPPNS | 214 (213) |
| | aggccctttcctccgaattct | | |
| H33 | cggattcacctgaacgtgtccgag | RIHLNVSERPFPPCPPCPNS | 216 (215) |
| | aggccctttcctccctgtccaccc | | |
| | tgcccgaattct | | |
| H36 | gggtgtccaccttgtccaggcggt | GCPPCPGGGGSNS | 222 (221) |
| | ggtggatcgaattct | | |
| H40 | ggatgtccaccttgtcccgcgaat | GCPPCPANS | 230 (229) |
| | tct | | |
| H44 | ggaggagctagttgtccaccttgt | GGASCPPCPGNS | 238 (237) |
| | cccgggaattct | | |
| H45 | ggaggagccagttgtccaccttgt | GGASCPPCAGNS | 240 (239) |
| | gccgggaattct | | |
| H46 | ggaggagccagttgtccaccttgt | GGASCPPCANS | 242 (241) |
| | gcgaattct | | |
| (G4S)3 | ggtggcggtggatccggcggaggt | GGGSGGGSGGGS | 245 (244) |
| | gggtcgggtggcggcggatct | | |
| (G4S)4 | ggtggcggtggctcgggcggtggt | GGGSGGGSGGGSGGGGS | 247 (246) |
| | ggatctggaggaggtgggagcggg | | |
| | ggaggtggcagt | | |

[0097] Alternative hinge and linker sequences that can be used as connecting regions may be crafted from portions of cell surface receptors that connect IgV-like or IgC-like domains. Regions between IgV-like domains where the cell surface receptor contains multiple IgV-like domains in tandem and between IgC-like domains where the cell surface receptor contains multiple tandem IgC-like regions could also be used as connecting regions or linker peptides. The preferred hinge and linker sequences are from 5 to 60 amino acids long, and may be primarily flexible, but may also provide more rigid characteristics, may contain primarily a helical structure with minimal β sheet structure. The preferred sequences are stable in plasma and serum and are resistant to proteolytic cleavage. The preferred sequences may contain a naturally occurring or added motif such as CPPC that confers the capacity to form a disulfide bond or multiple disulfide bonds to stabilize the C-terminus of the molecule. The preferred sequences may contain one or more glycosylation sites. Examples of preferred hinge and linker sequences include, but are not limited to, the interdomain regions between the IgV-like and IgC-like or between the IgC-like or IgV-like domains of CD2, CD4, CD22, CD33, CD48, CD58, CD66, CD80, CD86, CD96, CD150, CD166, and CD244. Alternative hinges may also be crafted from disulfide-containing regions of Type II receptors from non-IgSF members such as CD69, CD72 and CD161.

### PIMS Leader Peptide

[0098] PIMS leader peptides are designed to be used for their known purpose of functioning as a signal sequence to facilitate secretion of expressed PIMS molecules. Using any of the conventional leader peptides (signal sequences) is expected to direct nascently expressed PIMS molecules into a secretory pathway and to result in cleavage of the leader peptide from the mature PIMS molecule at or near the junction between the leader peptide and the PIMS molecule. A particular leader peptide will be chosen based on considerations known in the art, and sequences encoded by polynucleotides specifying restriction endonuclease cleavage sites may be introduced at the beginning and end of the coding sequence for the leader peptide to facilitate molecular engineering, provided that such introduced sequences specify amino acids that either do not interfere unacceptably with any desired processing of the leader peptide from the nascently expressed protein or do not interfere unacceptably with any desired function of the PIMS molecule if the leader peptide is not cleaved during maturation of the PIMS molecule. Exemplary leader peptides, used in the Examples, include the 2E12 or anti-CD28 antibody leader peptide disclosed herein, which has the amino acid sequence H₃N-MDFQVQIFSFLLISASVIMSRG-CO₂H (see, e.g., residues 1-22 of SEQ ID NO:2; see also, residues 1-23 of SEQ ID NO:4 which is the leader extended by a single V residue at the C-terminus), and the human VK3 leader peptide, H₃N-MEAPAQLLFLLLLWLPDTTG-CO₂H (SEQ ID NO:250; encoded, e.g., by nucleotides 1-60 of SEQ ID NO:358).

[0099] PIMS molecules exhibit a markedly different structure relative to other antibody and antibody-like binding proteins. A PIMS molecule has at least one specific binding domain, e.g., an scFv antigen-binding domain, that is located C-terminal to an immunoglobulin effector domain (i.e., a constant sub-region), such as an IgG1 effector domain. Also, the structure of a PIMS molecule is typically unique in that it has at least one region capable of participating in disulfide bond linkages, the PIMS linker region disposed between the effector and specific binding domains, which is always present, and the N-terminal hinge region that may be found in a PIMS molecule. Preferably, an N-terminal hinge region is derived from the same antibody class, isotype and sub-isotype as at least one of the C_{H2} and C_{H3} domains of that PIMS molecule. Further, the hinge or hinge-like domains of a PIMS molecule can be altered to affect either the effector domain, the binding domain, or both. In addition, PIMS molecules are expected to be easier to purify with minimal aggregation, which should give this molecular architecture a practical advantage as far as stability and amenability to production or manufacture.

[0100] There is a radical departure in design between PIMS molecules, placing the constant sub-region towards the N-terminal end of the polypeptide, and proteins, polypeptides and peptides found in nature. PIMS molecules, including both the PIMS polypeptides and their encoding nucleic acids or polynucleotides, exhibit a modular design adaptable to a wide variety of molecules. As noted herein, a PIMS molecule comprises a constant sub-region derived from an immunoglobulin, typically containing C_{H2} and C_{H3} domains derived from the same (preferred) or different antibodies, a PIMS linker peptide that may be a hinge region derived from an antibody, and a specific binding domain that comprises at least one binding region. Frequently, a mature PIMS molecule will further exhibit an N-terminal sequence derived from an antibody hinge region. Thus, a PIMS molecule according to the invention includes, but is not limited to, combinations of the modules (constant subregion, linker (hinge), and specific binding domain) disclosed herein or known in the art, located in relative orientation as provided herein. The invention expressly contemplates combining modules from the SMIP and Scorpion molecules identified in Table 5, with the sequence endpoints of the various modules noted in the Table.

TABLE 5

| | | Sequence Identifier (exemplary |
|---|---|---|
| Description | Features (amino acid endpoints) | encoding polynucleotide) |
| anti-CD20 (2H7) LH (AA) | Leader: 1-22 | 120 (119) |
| | VL: 23-128 | |
| | Linker: 129-144 | |
| | VH: 145-265 | |
| anti-CD28 (2e12) LH (AA) | Leader: 1-23 | 126 (125) |
| | VL: 24-135 | |
| | Linker: 136-150 | |
| | VH: 151-271 | |
| anti-CD28 (2e12) HL (AA) | Leader: 1-23 | 128 (127) |
| | VH: 24-144 | |
| | Linker: 145-164 | |
| | VL: 165-276 | |
| G-28-1 VLVH (AA) | VL: 1-107 | 130 (129) |
| | Linker: 108-124 | |
| | VH: 125-239 | |
| G28-1 VHVL (AA) | VH: 1-121 | 132 (131) |
| | Linker: 122-144 | |
| | VL: 145-253 | |
| G-19-4 VLVH (AA) | VL: 1-108 | 134 (133) |
| | Linker: 109-125 | |
| | VH: 126-247 | |
| G19-4 VHVL (AA) | VH: 1-122 | 136 (135) |
| | Linker: 123-139 | |
| | VL: 140-248 | |
| 019044 VHVL (AA) | | 138 (137) |
| 2H7sssIgG1-STD1-2e12HL | Leader: 1-22 | 2 (1) |
| (w/2E12 leader) (AA) C_{H2}C_{H3} | VL: 23-128 | |
| | Linker: 129-144 | |
| | VH: 145-265 | |
| | Hinge: 268-281 | |
| | EFD-BD2 linker: 500-519 | |
| | VH2: 520-640 | |
| | Linker2: 641-660 | |
| | VL2: 661-772 | |
| 2H7sssIgG1(P238S/P331S)- | Leader: 1-22 | 3 |
| STD1-2e12HL (w/2e12 | VL: 23-128 | |
| leader) (AA) | Linker: 129-144 | |
| C_{H2}C_{H3} | VH: 145-265 | |
| | Hinge: 268-282 | |
| | EFD-BD2 linker: 500-519 | |
| | VH2: 520-640 | |
| | Linker2: 641-660 | |
| | VL2: 661-772 | |
| 2H7sssIgG1-STD1-2e12LH | Leader: 1-22 | 5 (4) |
| (w/2e12 leader) (AA) | VL: 23-128 | |
| | Linker: 129-144 | |
| | VH: 145-265 | |
| | Hinge: 268-282 | |
| | EFD-BD2 Linker: 500-519 | |
| | VL2: 520-631 | |
| | Linker2: 632-646 | |
| | VH2: 647-767 | |
| 2H7sssIgG1(P238S/P331S)- | Leader: 1-22 | 6 |
| STD1-2e12LH (w/2e12 | VL: 23-128 | |
| leader) (AA) | Linker: 129-144 | |
| | VH: 145-265 | |
| | Hinge: 268-282 | |
| | EFD-BD2 Linker: 500-519 | |
| | VL2: 520-631 | |
| | Linker2: 632-646 | |
| | VH2: 647-767 | |
| 2H7sssIgG1-STD2-2e12LH | Leader: 1-22 | 8 (7) |
| (w/2e12 leader) (AA) | VL: 23-129 | |
| | Linker: 130-144 | |
| | VH: 145-265 | |
| | Hinge: 268-282 | |
| | EFD-BD2 Linker: 500-537 | |
| | VL2: 538-649 | |
| | Linker2: 650-664 | |
| | VH2: 665-785 | |
| 2H7sssIgG1(P238S/P331S)- | Leader: 1-22 | 9 |
| STD2-2e12LH (w/2e12 | VL: 23-128 | |
| leader) (AA) | Linker: 129-144 | |
| | VH: 145-265 | |
| | Hinge: 268-281 | |
| | EFD-BD2 Linker: 500-537 | |
| | VL2: 538-649 | |
| | Linker2: 650-664 | |
| | VH2: 665-785 | |
| 2H7sssIgG1-STD2-2e12HL | Leader: 1-22 | 11 (10) |
| (w/2e12 leader) (AA) | VL: 23-128 | |
| | Linker: 129-144 | |
| | VH: 145-265 | |
| | Hinge: 268-282 | |
| | EFD-BD2 Linker: 500-537 | |
| | VH2: 538-658 | |
| | Linker2: 659-678 | |
| | VL2: 679-790 | |
| 2H7sssIgG1(P238S/P331S)- | Leader: 1-22 | 12 |
| STD2-2e12HL (w/2e12 | VL: 23-128 | |
| leader) (AA) | Linker: 129-144 | |
| | VH: 145-265 | |
| | Hinge: 268-282 | |
| | EFD-BD2 Linker: 500-537 | |
| | VH2: 538-658 | |
| | Linker2: 659-678 | |
| | VL2: 679-790 | |
| 2H7sssIgG1-H1-2e12HL | Leader: 1-22 | 14 (13) |
| (w/2e12 leader) (AA) | VL: 23-128 | |
| | Linker: 129-144 | |
| | VH: 145-265 | |
| | Hinge: 268-281 | |
| | EFD-BD2 Linker: 500-501 | |
| | VH2: 502-622 | |
| | Linker2: 623-642 | |
| | VL2: 643-754 | |
| 2H7sssIgG1-H2-2e12HL | Leader: 1-22 | 16 (15) |
| (w/2e12 leader) (AA) | VL: 23-127 | |
| | Linker: 128-144 | |
| | VH: 145-265 | |
| | Hinge: 268-282 | |
| | EFD-BD2 Linker: 500-507 | |
| | VH2: 508-628 | |
| | Linker2: 629-648 | |
| | VL2: 649-760 | |
| 2H7sssIgG1-H3-2e12HL | Leader: 1-22 | 18 (17) |
| (w/e12 leader) (AA) | VL: 23-128 | |
| | Linker: 129-144 | |
| | VH: 145-265 | |
| | Hinge: 268-282 | |
| | EFD-BD2 Linker: 500-509 | |
| | VH2: 510-630 | |
| | Linker2: 631-650 | |
| | VL2: 651-762 | |
| 2H7sssIgG1-H4-2e12HL | Leader: 1-22 | 20 (19) |
| (AA) | VL: 23-128 | |
| | Linker: 129-144 | |
| | VH: 145-265 | |
| | Hinge: 268-282 | |
| | EFD-BD2 Linker: 500-512 | |
| | VH2: 513-633 | |
| | Linker2: 634-653 | |
| | VL2: 654-765 | |
| 2H7sssIgG1-H5-2e12HL | Leader: 1-22 | 22 (21) |
| (w/2e12 leader) (AA) | VL: 23-128 | |
| | Linker: 129-144 | |
| | VH: 145-265 | |
| | Hinge: 268-282 | |
| | EFD-BD2 Linker: 500-514 | |
| | VH2: 515-635 | |
| | Linker2: 636-655 | |
| | VL2: 656-767 | |
| 2H7sssIgG1-H6-2e12HL | Leader: 1-22 | 24 (23) |
| (w/2e12 leader) (AA) | VL: 23-128 | |
| | Linker: 129-144 | |
| | VH: 145-265 | |
| | Hinge: 268-282 | |
| | EFD-BD2 Linker: 500-517 | |
| | VH2: 518-638 | |
| | Linker2: 639-658 | |
| | VL2: 659-770 | |
| 2H7sscIgG1-H7-2e12HL | Leader: 1-22 | 26 (25) |
| (w/2e12 linker) (AA) | VL: 23-128 | |
| | Linker: 129-144 | |
| | VH: 145-265 | |
| | Hinge: 268-282 | |
| | EFD-BD2 Linker: 500-507 | |
| | VH2: 508-628 | |
| | Linker2: 629-648 | |
| | VL2: 649-760 | |
| 2H7sssIgG1-H7-G194 HL | Leader: 1-22 | 28 (27) |
| (w/2e12 leader) (AA) | VL1: 23-128 | |
| | Linker: 129-144 | |
| | VH1: 145-265 | |
| | Hinge: 268-282 | |
| | EFD-BD2 Linker: 500-507 | |
| | VH2: 508-629 | |
| | Linker2: 630-646 | |
| | VL2: 647-754 | |
| 2H7sssIgG1-H7-G281 HL | Leader: 1-22 | 30 (29) |
| (w/2e12 leader) (AA) | VL1: 23-128 | |
| | Linker: 129-144 | |
| | VH1: 145-265 | |
| | Hinge: 268-282 | |
| | EFD-BD2 Linker: 500-507 | |
| | VH2: 508-629 | |
| | Linker2: 630-651 | |
| | VL2: 652-759 | |
| 2e12-sss-IgG1 HL SMIP | Leader: 1-22 | 32 (31) |
| (AA) | VH: 24-144 | |
| | Linker: 145-164 | |
| | VL: 165-276 | |
| | Hinge: 279-293 | |
| 2e12-sss-IgG1 LH SMIP | Leader: 1-23 | 34 (33) |
| (AA) | VL: 24-135 | |
| | Linker: 136-150 | |
| | VH: 151-271 | |
| | Hinge: 274-288 | |
| G28-1 LH SMIP (AA) | Leader: 1-20 | 36 (35) |
| | VL: 21-127 | |
| | Linker: 128-144 | |
| | VH: 145-260 | |
| | Hinge: 261-275 | |
| G28-1 HL SMIP (AA) | Leader: 1-20 | 38 (37) |
| | VH: 21-136 | |
| | Linker: 137-158 | |
| | VL: 159-266 | |
| | Hinge: 268-283 | |
| G19-4 LH SMIP (AA) | Leader: 1-20 | 40 (39) |
| | VL: 21-128 | |
| | Linker: 129-145 | |
| | VH: 146-267 | |
| | Hinge: 268-282 | |
| G19-4 HL SMIP (AA) | Leader: 1-20 | 42 (41) |
| | VH: 21-142 | |
| | Linker: 143-159 | |
| | VL: 160-267 | |
| | Hinge: 270-284 | |
| n2H7sssIgG1-STD1-2e12HL | Leader: 1-20 | 44 (43) |
| (AA) | VL: 21-127 | |
| | Linker: 128-142 | |
| | VH: 143-264 | |
| | Hinge: 265-279 | |
| | EFD-BD2 Linker: 497-516 | |
| | VH2: 517-637 | |
| | Linker2: 638-657 | |
| | VL2: 658-769 | |
| n2H7sssIgG1-STD2-2e12LH | Leader: 1-20 | 46 (45) |
| (AA) | VL: 21-126 | |
| | Linker: 127-142 | |
| | VH: 143-264 | |
| | Hinge: 265-279 | |
| | EFD-BD2 Linker: 497-516 | |
| | VL2: 517-628 | |
| | Linker2: 629-643 | |
| | VH2: 644-764 | |
| n2H7sssIgG1-H1-2e12HL | Leader: 1-20 | 48 (47) |
| (AA) | VL: 21-126 | |
| | Linker: 127-142 | |
| | VH: 143-264 | |
| | Hinge: 265-279 | |
| | EFD-BD2 Linker: 497-498 | |
| | VH2: 499-619 | |
| | Linker2: 620-639 | |
| | VL2: 640-751 | |
| n2H7sssIgG1-H2-2e12HL | Leader: 1-20 | 50 (49) |
| (AA) | VL: 21-126 | |
| | Linker: 127-142 | |
| | VH: 143-264 | |
| | Hinge: 265-279 | |
| | EFD-BD2 Linker: 497-504 | |
| | VH2: 505-625 | |
| | Linker2: 626-645 | |
| | VL2: 646-757 | |
| n2H7sssIgG1-H3-2e12HL | Leader: 1-20 | 52 (51) |
| (AA) | VL: 21-126 | |
| | Linker: 127-142 | |
| | VH: 143-264 | |
| | Hinge: 265-279 | |
| | EFD-BD2 Linker: 497-506 | |
| | VH2: 507-627 | |
| | Linker2: 628-647 | |
| | VL2: 648-759 | |
| n2H7sssIgG1-H4-2e12HL | Leader: 1-20 | 54 (53) |
| (AA) | VL: 21-126 | |
| | Linker: 127-142 | |
| | VH: 143-264 | |
| | Hinge: 265-279 | |
| | EFD-BD2 Linker: 497-509 | |
| | VH2: 510-630 | |
| | Linker2: 631-650 | |
| | VL2: 651-762 | |
| n2H7sssIgG1-H5-2e12HL | Leader: 11-20 | 56 (55) |
| (AA) | VL: 21-126 | |
| | Linker: 127-142 | |
| | VH: 143-264 | |
| | Hinge: 265-279 | |
| | EFD-BD2 Linker: 497-511 | |
| | VH2: 512-632 | |
| | Linker2: 633-652 | |
| | VL2: 653-764 | |
| n2H7sssIgG1-H6-2e12HL | Leader: 1-20 | 58 (57) |
| (AA) | VL: 21-126 | |
| | Linker: 127-142 | |
| | VH: 143-264 | |
| | Hinge: 265-279 | |
| | EFD-BD2 Linker: 497-514 | |
| | VH2: 515-635 | |
| | Linker2: 636-655 | |
| | VL2: 656-767 | |
| 2H7cscIgG1-STD1-2e12HL | Leader: 1-22 | 60 (59) |
| (w/2E12 leader) (AA) | VL: 23-128 | |
| | Linker: 129-144 | |
| | VH: 145-265 | |
| | Hinge: 268-282 | |
| | EFD-BD2 Linker: 500-519 | |
| | VH2: 520-640 | |
| | Linker2: 641-660 | |
| | VL2: 661-772 | |

[0101] One use for PIMS molecules is in the assessment and/or optimization of the effector domain and/or the specific binding domain of, e.g., multi-specific binding proteins such as scorpions. These PIMS molecules have activity on their own as well as offering a platform for better assessing Scorpion Binding Domain 2 (BD2) and the effector domain-BD2 Scorpion linker. Beyond the uses as specific binding proteins with effector function and the uses in assessing Scorpion BD2 and effector domain-BD2 linker activities, PIMS molecules may be modified to alter, e.g., an effector domain activity such as ADCC and/or CDC activities, which might include changes to either the N-terminal hinge (e.g., IgG1 SCC-P hinge) or the hinge-like PIMS linker disposed between the constant sub-region or effector domain and the specific binding domain/(s). Data obtained to date show that the ADCC activity of humanized CD20 PIMS are at least as good as their SMIP counterparts and have the potential to be potent alternative molecules for delivering enhanced effector functions to specific targets, such as cells displaying CD20.

### Proteins and Polypeptides

[0102] In certain embodiments of the invention, there are provided any of the herein-described specific binding proteins with effector function, or PIMS, wherein the specific binding protein or peptide with effector function comprises two or more binding domain polypeptide sequences (e.g., a V_{L} and a V_{H}) constituting at least one specific binding site. The binding domain polypeptide sequence is derived from an antigen variable region. The antibodies from which the binding domains are derived may be antibodies that are polyclonal, including monospecific polyclonal, monoclonal (mAbs), recombinant, chimeric, humanized (such as CDR-grafted), human, single-chain, catalytic, and any other form of antibody known in the art, as well as fragments, variants or derivatives thereof. In some embodiments, a binding domain is a binding site (e.g., a camelid binding domain). In some embodiments, each of the binding domains of the protein according to the invention is derived from a complete variable region of an immunoglobulin. In preferred embodiments, the binding domains are each based on a human Ig variable region. In other embodiments, the protein is derived from a fragment of an Ig variable region. In such embodiments, it is preferred that each binding domain polypeptide sequence correspond to the sequences of each of the complementarity determining regions of a given Ig variable region. Also contemplated within the invention are binding domains that correspond to fewer than all CDRs of a given Ig variable region, provided that such binding domains retain the capacity to specifically bind to at least one target.

[0103] The specific binding protein with effector function or PIMS also has a constant sub-region sequence derived from an immunoglobulin constant region, preferably an antibody heavy chain constant region, covalently linked through its C-terminus to a PIMS linker region, the PIMS linker region in turn being linked through its C-terminus to a binding domain in the PIMS molecule.

[0104] In some embodiments, the PIMS linker interposed between the constant sub-region and a binding domain is derived from a wild-type hinge region of an immunoglobulin, such as an IgG1, IgG2, IgG3, IgG4, IgA, IgD or an IgE hinge region. In other embodiments, the invention provides PIMS with PIMS linkers that are derived from altered hinges. One category of altered hinge regions suitable for inclusion in PIMS molecules is the category of hinges with an altered number of cysteine residues, particularly those Cys residues known in the art to be involved in interchain disulfide bond formation in immunoglobulin counterpart molecules having wild-type hinges. Thus, proteins may have an IgG1 hinge in which one of the three hinge Cys residues capable of participating in interchain disulfide bond formations is missing. To indicate the cysteine sub-structure of altered hinges, the Cys subsequence is presented from N- to C-terminus. Using this identification system, the PIMS with altered IgG hinges include hinge structures characterized as cxc, xxc, ccx, xxc, xcx, cxx, and xxx, where “x” is “not c”. The Cys residue may be either deleted or substituted by an amino acid that results in a conservative substitution or a non-conservative substitution. In some embodiments, the cysteine is replaced by a serine.

[0105] For PIMS proteins with IgG1 hinges or hinge-like structures, there may be 0, 1, 2, or 3 Cys residues in the PIMS linker or N-terminal hinge region, and preferably 1 or 2 Cys residues. For proteins with IgG2 hinges, there may be 0, 1, 2, 3, or 4 Cys residues, preferably 1 or 2 Cys residues. For altered IgG2 hinges containing 1, 2 or 3 Cys residues, all possible subsets of Cys residues are contemplated. Thus, for IgG2 hinges having one Cys, the PIMS molecule may have the following Cys motif in the hinge region: cxxx, xcxx, xxcx, or xxxc. For IgG2 hinge variants having 2 or 3 Cys residues, all possible combinations of retained and substituted (or deleted) Cys residues are contemplated. For PIMS with altered IgG3 or altered IgG4 hinge regions, a reduction in Cys residues from 1 to the complete number of Cys residues in the hinge region is contemplated, regardless of whether the loss is through deletion or substitution by conservative or non-conservative amino acids (e.g., Serine). In like manner, PIMS having a wild-type IgA, IgD or IgE hinge are contemplated, as are corresponding altered hinge regions having a reduced number of Cys residues extending from 0 to the total number of Cys residues found in the corresponding wild-type hinge. In some embodiments having an IgG1 hinge, the first, or N-terminal, Cys residue of the hinge is retained. It is contemplated that PIMS will be capable of forming homo-multimers, such as homo-dimers. Further, proteins with altered hinges may have alterations at the termini of the hinge region, e.g., loss or substitution of one or more amino acid residues at the N-terminus, C-terminus or both termini of a given region or domain, such as a PIMS linker or hinge domain, as disclosed herein.

[0106] In another exemplary embodiment, the constant sub-region is derived from a constant region that comprises a native, or an engineered, IgD hinge region. The wild-type human IgD hinge has one cysteine that forms a disulfide bond with the light chain in the native IgD structure. In some embodiments, this IgD hinge cysteine is mutated (e.g., deleted) to generate an altered hinge for use as a PIMS linker region between the constant sub-region and a specific binding domain. Other amino acid changes or deletions or alterations in an IgD hinge that do not result in undesired hinge inflexibility are within the scope of the invention. Native or engineered IgD hinge regions from other species are also within the scope of the invention, as are humanized native or engineered IgD hinges from non-human species, and (other non IgD) hinge regions from other human, or non-human, antibody isotypes, (such as the llama IgG2 hinge).

[0107] The invention further comprehends constant sub-regions attached at the C-terminus, and optionally at the N-terminus, to hinges and PIMS linkers that correspond to a known hinge region, such as an IgG1 hinge or an IgD hinge, as noted above. The hinge may be a modified or altered (relative to wild-type) hinge region in which at least one cysteine residue known to participate in inter-chain disulfide bond linkage is replaced by another amino acid in a conservative substitution (e.g., Ser for Cys) or a non-conservative substitution.

[0108] Alternative hinge and PIMS linker sequences that can be used as connecting regions are from portions of cell surface receptors that connect immunoglobulin V-like or immunoglobulin C-like domains. Regions between Ig V-like domains where the cell surface receptor contains multiple Ig V-like domains in tandem, and between Ig C-like domains where the cell surface receptor contains multiple tandem Ig C-like regions are also contemplated as connecting regions. Hinge and PIMS linker sequences are typically from 5 to 60 amino acids long, and may be primarily flexible, but may also provide more rigid characteristics. In addition, PIMS linkers frequently provide spacing that facilitates minimization of steric hindrance between the binding domains. Preferably, these hinge and PIMS linker peptides are primarily a helical in structure, with minimal β sheet structure. The preferred sequences are stable in plasma and serum and are resistant to proteolytic cleavage. The preferred sequences may contain a naturally occurring or added motif such as the CPPC motif that confers a disulfide bond to stabilize dimer formation. The preferred sequences may contain one or more glycosylation sites. Examples of preferred hinge and PIMS linker sequences include, but are not limited to, the interdomain regions between the Ig V-like and Ig C-like regions of CD2, CD4, CD22, CD33, CD48, CD58, CD66, CD80, CD86, CD150, CD166, and CD244.

[0109] The constant sub-region may be derived from a camelid constant region, such as either a llama or camel IgG2 or IgG3. Specifically contemplated is a constant sub-region having the C_{H2}-C_{H3}, or hinge—C_{H2}-C_{H3}, region from any Ig class, or from any IgG subclass, such as IgG1 (e.g., human IgG1). The constant sub-region also may be a C_{H3} domain from any Ig class or subclass, such as IgG1 (e.g., human IgG1).

[0110] IgA constant domains, such as an IgA1 hinge, an IgA2 hinge, an IgA C_{H2} and an IgA C_{H3} domains with a mutated or missing tailpiece are also contemplated as constant sub-regions. The constant sub-region may also correspond to engineered antibodies in which, e.g., a loop graft has been constructed by making selected amino acid substitutions using an IgG framework to generate a binding site for a receptor other than a natural F_{C}R (CD16, CD32, CD64, F_{C}εR1), as would be understood in the art. An exemplary constant sub-region of this type is an IgG C_{H2}-C_{H3} region modified to have a CD89 binding site.

[0111] This aspect of the invention provides a specific binding protein or peptide having effector function, comprising, consisting essentially of, or consisting of (a) an N-terminally disposed constant sub-region polypeptide binding domain polypeptide sequence derived from an immunoglobulin constant region that is fused or otherwise connected to (b) a PIMS linker region sequence, wherein the PIMS linker region polypeptide may be as described herein, and may comprise, consist essentially of, or consist of, for example, a hinge region or an alternative hinge region polypeptide sequence, in turn fused or otherwise connected to (c) a C-terminally disposed native or engineered binding domain polypeptide sequence derived from an immunoglobulin.

[0112] The constant sub-region polypeptide sequence derived from an immunoglobulin constant region is capable of at least one immunological activity selected from the group consisting of antibody dependent cell-mediated cytotoxicity, CDC, complement fixation, and Fc receptor binding, and the binding domain polypeptide is capable of specifically binding to a target, such as an antigen.

[0113] This aspect of the invention also comprehends variant proteins or polypeptides exhibiting an effector function that are at least 80%, and preferably 85%, 90%, 95%, 99%, or 99.5% identical to a specific binding protein with effector function of specific sequence as disclosed herein.

### Polynucleotides

[0114] The invention also provides polynucleotides (isolated or purified or pure polynucleotides) encoding the proteins or peptides according to the invention, vectors (including cloning vectors and expression vectors) comprising such polynucleotides, and cells (e.g., host cells) transformed or transfected with a polynucleotide or vector according to the invention. In encoding the proteins or polypeptides of the invention, the polynucleotides encode a constant sub-region (an Fc domain), a PIMS linker, and a specific binding domain, all derived from immunoglobulins, preferably human immunoglobulins. The binding domain may contain a sequence corresponding to a full-length variable region sequence (either heavy chain and/or light chain), or to a partial sequence thereof, provided that each such binding domain retains the capacity to specifically bind. The constant sub-region or Fc domain may have a sequence that corresponds to a full-length immunoglobulin Fc domain sequence or to a partial sequence thereof, provided that the Fc domain exhibits at least one effector function as defined herein, and provided that the Fc domain is not a complete antibody Fc region. In addition, each of the binding domains of a given binding site may be joined via a linker peptide that typically is at least 8, and preferably at least 13, amino acids in length. A preferred linker sequence is a sequence based on the Gly4Ser motif, such as (Gly4Ser)ₙ, were n=3-5.

[0115] Variants of the specific binding proteins with effector function are also comprehended by the invention. Variant polynucleotides are at least 90%, and preferably 95%, 99%, or 99.9% identical to one of the polynucleotides of defined sequence as described herein, or that hybridize to one of those polynucleotides of defined sequence under stringent hybridization conditions of 0.015 M sodium chloride, 0.0015 M sodium citrate at 65-68° C. or 0.015 M sodium chloride, 0.0015M sodium citrate, and 50% formamide at 42° C. The polynucleotide variants retain the capacity to encode a specific binding protein with effector function or PIMS.

[0116] The term “stringent” is used to refer to conditions that are commonly understood in the art as stringent. Hybridization stringency is principally determined by temperature, ionic strength, and the concentration of denaturing agents such as formamide. Examples of stringent conditions for hybridization and washing are 0.015 M sodium chloride, 0.0015 M sodium citrate at 65-68° C. or 0.015 M sodium chloride, 0.0015 M sodium citrate, and 50% formamide at 42° C. See Sambrook et al., Molecular Cloning: A Laboratory Manual, 2nd Ed., Cold Spring Harbor Laboratory, (Cold Spring Harbor, N.Y. 1989).

[0117] More stringent conditions (such as higher temperature, lower ionic strength, higher formamide, or other denaturing agent) may also be used; however, the rate of hybridization will be affected. In instances wherein hybridization of deoxyoligonucleotides is concerned, additional exemplary stringent hybridization conditions include washing in 6×SSC, 0.05% sodium pyrophosphate at 37° C. (for 14-base oligonucleotides), 48° C. (for 17-base oligonucleotides), 55° C. (for 20-base oligonucleotides), and 60° C. (for 23-base oligonucleotides).

[0118] In a related aspect of the invention, there is provided a method of producing a polypeptide or protein or other construct of the invention, for example, including a PIMS, comprising the steps of (a) culturing a host cell as described or provided for herein under conditions that permit expression of the construct; and (b) isolating the PIMS expression product from the host cell or host cell culture.

### Constructs

[0119] The present invention also relates to vectors, and to constructs prepared from known vectors, that each include a polynucleotide or nucleic acid of the invention, and in particular to recombinant expression constructs, including any of various known constructs, including delivery constructs, useful for gene therapy, that include any nucleic acids encoding, for example, PIMS, as provided herein; to host cells which are genetically engineered with vectors and/or other constructs of the invention and to methods of administering expression or other constructs comprising nucleic acid sequences encoding a PIMS, or fragments or variants thereof, by recombinant techniques.

[0120] Various constructs of the invention encoding PIMS can be expressed in virtually any host cell, including in vivo host cells in the case of use for gene therapy, under the control of appropriate promoters, depending on the nature of the construct (e.g., type of promoter, as described above), and depending on the nature of the desired host cell (e.g., postmitotic terminally differentiated or actively dividing; e.g., maintenance of an expressible construct as an episome or integrated into the host cell genome).

[0121] Appropriate cloning and expression vectors for use with prokaryotic and eukaryotic hosts are described, for example, in Sambrook, et al., Molecular Cloning: A Laboratory Manual, Second Edition, Cold Spring Harbor, N.Y., (1989). Exemplary cloning/expression vectors include, but are not limited to, cloning vectors, shuttle vectors, and expression constructs, that may be based on plasmids, phagemids, phasmids, cosmids, viruses, artificial chromosomes, or any nucleic acid vehicle suitable for amplification, transfer, and/or expression of a polynucleotide contained therein that is known in the art. As noted herein, in preferred embodiments of the invention, recombinant expression is conducted in mammalian cells that have been transfected, transformed or transduced with a nucleic acid according to the invention. See also, for example, Machida, C A., “Viral Vectors for Gene Therapy: Methods and Protocols”; Wolff, J A, “Gene Therapeutics: Methods and Applications of Direct Gene Transfer” (Birkhäuser 1994); Stein, U and Walther, W (eds., “Gene Therapy of Cancer: Methods and Protocols” (Humana Press 2000); Robbins, P D (ed.), “Gene Therapy Protocols” (Humana Press 1997); Morgan, J R (ed.), “Gene Therapy Protocols” (Humana Press 2002); Meager, A (ed.), “Gene Therapy Technologies, Applications and Regulations: From Laboratory to Clinic” (John Wiley & Sons Inc. 1999); MacHida, C A and Constant, J G, “Viral Vectors for Gene Therapy: Methods and Protocols” (Humana Press 2002); “New Methods Of Gene Therapy For Genetic Metabolic Diseases NIH Guide,” Volume 22, Number 35, Oct. 1, 1993. See also U.S. Pat. Nos. 6,384,210; 6,384,203; 6,384,202; 6,384,018; 6,383,814; 6,383,811; 6,383,795; 6,383,794; 6,383,785; 6,383,753; 6,383,746; 6,383,743; 6,383,738; 6,383,737; 6,383,733; 6,383,522; 6,383,512; 6,383,481; 6,383,478; 6,383,138; 6,380,382; 6,380,371; 6,380,369; 6,380,362; 6,380,170; 6,380,169; 6,379,967; and 6,379,966.

[0122] Typically, expression constructs are derived from plasmid vectors. One preferred construct is a modified pNASS vector (Clontech, Palo Alto, Calif.), which has nucleic acid sequences encoding an ampicillin resistance gene, a polyadenylation signal and a T7 promoter site. Other suitable mammalian expression vectors are well known (see, e.g., Ausubel et al., 1995; Sambrook et al., supra; see also, e.g., catalogues from Invitrogen, San Diego, Calif.; Novagen, Madison, Wis.; Pharmacia, Piscataway, N.J.). Presently preferred constructs may be prepared that include a dihydrofolate reductase (DHFR)-encoding sequence under suitable regulatory control, for promoting enhanced production levels of PIMS, which levels result from gene amplification following application of an appropriate selection agent (e.g., methotrexate).

[0123] Generally, recombinant expression vectors will include origins of replication and selectable markers permitting transformation of the host cell, and a promoter derived from a highly expressed gene to direct transcription of a downstream structural sequence, as described above. A vector in operable linkage with a polynucleotide according to the invention yields a cloning or expression construct. Exemplary cloning/expression constructs contain at least one expression control element, e.g., a promoter, operably linked to a polynucleotide of the invention. Additional expression control elements, such as enhancers, factor-specific binding sites, terminators, and ribosome binding sites are also contemplated in the vectors and cloning/expression constructs according to the invention. The heterologous structural sequence of the polynucleotide according to the invention is assembled in appropriate phase with translation initiation and termination sequences. Thus, for example, the PIMS-encoding nucleic acids as provided herein may be included in any one of a variety of expression vector constructs as a recombinant expression construct for expressing such a protein in a host cell. In certain preferred embodiments, the constructs are included in formulations that are administered in vivo. Such vectors and constructs include chromosomal, nonchromosomal and synthetic DNA sequences, e.g., derivatives of SV40; bacterial plasmids; phage DNA; yeast plasmids; vectors derived from combinations of plasmids and phage DNA; viral DNA, such as vaccinia, adenovirus, fowl pox virus, and pseudorabies; or replication deficient retroviruses as described below. However, any other vector may be used for preparation of a recombinant expression construct, and in preferred embodiments such a vector will be replicable and viable in the host.

[0124] The appropriate DNA sequence(s) may be inserted into a vector, for example, by a variety of procedures. In general, a DNA sequence is inserted into an appropriate restriction endonuclease cleavage site(s) by procedures known in the art. Standard techniques for cloning, DNA isolation, amplification and purification, for enzymatic reactions involving DNA ligase, DNA polymerase, restriction endonucleases and the like, and various separation techniques are contemplated. A number of standard techniques are described, for example, in Ausubel et al. (1993 Current Protocols in Molecular Biology, Greene Publ. Assoc. Inc. & John Wiley & Sons, Inc., Boston, Mass.); Sambrook et al. (1989 Molecular Cloning, Second Ed., Cold Spring Harbor Laboratory, Plainview, N.Y.); Maniatis et al. (1982 Molecular Cloning, Cold Spring Harbor Laboratory, Plainview, N.Y.); Glover (Ed.) (1985 DNA Cloning Vol. I and II, IRL Press, Oxford, UK); Hames and Higgins (Eds.), (1985 Nucleic Acid Hybridization, IRL Press, Oxford, UK); and elsewhere.

[0125] The DNA sequence in the expression vector is operatively linked to at least one appropriate expression control sequence (e.g., a constitutive promoter or a regulated promoter) to direct mRNA synthesis. Representative examples of such expression control sequences include promoters of eukaryotic cells or their viruses, as described above. Promoter regions can be selected from any desired gene using CAT (chloramphenicol acetyltransferase) vectors or other vectors with selectable markers. Eukaryotic promoters include CMV immediate early, HSV thymidine kinase, early and late SV40, LTRs from retrovirus, and mouse metallothionein-I. Selection of the appropriate vector and promoter is well within the level of ordinary skill in the art, and preparation of certain particularly preferred recombinant expression constructs comprising at least one promoter or regulated promoter operably linked to a nucleic acid encoding a protein or polypeptide according to the invention is described herein.

[0126] Transcription of the DNA encoding proteins and polypeptides of the invention by higher eukaryotes may be increased by inserting an enhancer sequence into the vector. Examples include the SV40 enhancer on the late side of the replication origin bp 100 to 270, a cytomegalovirus early promoter enhancer, the polyoma enhancer on the late side of the replication origin, and adenovirus enhancers.

[0127] Gene therapies using the nucleic acids of the invention are also contemplated, comprising strategies to replace defective genes or add new genes to cells and/or tissues, and is being developed for application in the treatment of cancer, the correction of metabolic disorders and in the field of immunotherapy. Gene therapies of the invention include the use of various constructs of the invention, with or without a separate carrier or delivery vehicle or constructs, for treatment of the diseases, disorders, and/or conditions noted herein. Such constructs may also be used as vaccines for treatment or prevention of the diseases, disorders, and/or conditions noted herein. DNA vaccines, for example, make use of polynucleotides encoding immunogenic protein and nucleic acid determinants to stimulate the immune system against pathogens or tumor cells. Such strategies can stimulate either acquired or innate immunity or can involve the modification of immune function through cytokine expression. In vivo gene therapy involves the direct injection of genetic material into a patient or animal, typically to treat, prevent or ameliorate a disease or symptoms associated with a disease. Vaccines and immune modulation are systemic therapies. With tissue-specific in vivo therapies, such as those that aim to treat cancer, localized gene delivery and/or expression/targeting systems are preferred. Diverse gene therapy vectors that target specific tissues are known in the art, and procedures have been developed to physically target specific tissues, for example, using catheter-based technologies, all of which are contemplated herein.

[0128] Ex vivo approaches to gene therapy are also contemplated herein and involve the removal, genetic modification, expansion and re-administration of a subject's, e.g., human patient's, own cells. Examples include bone marrow transplantation for cancer treatment or the genetic modification of lymphoid progenitor cells. Ex vivo gene therapy is preferably applied to the treatment of cells that are easily accessible and can survive in culture during the gene transfer process (such as blood or skin cells).

[0129] Useful gene therapy vectors include adenoviral vectors, lentiviral vectors, Adeno-associated virus (AAV) vectors, Herpes Simplex Virus (HSV) vectors, and retroviral vectors. Gene therapies may also be carried out using “naked DNA,” liposome-based delivery, lipid-based delivery (including DNA attached to positively charged lipids), electroporation, and ballistic projection.

[0130] In certain embodiments, including but not limited to gene therapy embodiments, the vector may be a viral vector such as, for example, a retroviral vector. Miller et al., 1989 BioTechniques 7:980; Coffin and Varmus, 1996 Retroviruses, Cold Spring Harbor Laboratory Press, NY. For example, retroviruses from which the retroviral plasmid vectors may be derived include, but are not limited to, Moloney Murine Leukemia Virus, spleen necrosis virus, retroviruses such as Rous Sarcoma Virus, Harvey Sarcoma virus, avian leukosis virus, gibbon ape leukemia virus, human immunodeficiency virus, adenovirus, Myeloproliferative Sarcoma Virus, and mammary tumor virus.

[0131] Retroviruses are RNA viruses which can replicate and integrate into the genome of a host cell via a DNA intermediate. This DNA intermediate, or provirus, may be stably integrated into the host cell DNA. According to certain embodiments of the present invention, an expression construct may comprise a retrovirus into which a foreign gene that encodes a foreign protein is incorporated in place of normal retroviral RNA. When retroviral RNA enters a host cell coincident with infection, the foreign gene is also introduced into the cell, and may then be integrated into host cell DNA as if it were part of the retroviral genome. Expression of this foreign gene within the host results in expression of the foreign protein.

[0132] Most retroviral vector systems that have been developed for gene therapy are based on murine retroviruses. Such retroviruses exist in two forms, as free viral particles referred to as virions, or as proviruses integrated into host cell DNA. The virion form of the virus contains the structural and enzymatic proteins of the retrovirus (including the enzyme reverse transcriptase), two RNA copies of the viral genome, and portions of the source cell plasma membrane containing viral envelope glycoprotein. The retroviral genome is organized into four main regions: the Long Terminal Repeat (LTR), which contains cis-acting elements necessary for the initiation and termination of transcription and is situated both 5′ and 3′ to the coding genes, and the three genes encoding gag, pol, and env. These three genes, gag, pol, and env, encode, respectively, internal viral structures, enzymatic proteins (such as integrase), and the envelope glycoprotein (designated gp70 and p15e) which confers infectivity and host range specificity of the virus, as well as the “R” peptide of undetermined function.

[0133] Separate packaging cell lines and vector-producing cell lines have been developed because of safety concerns regarding the uses of retroviruses, including uses in expression constructs. Briefly, this methodology employs the use of two components, a retroviral vector and a packaging cell line (PCL). The retroviral vector contains long terminal repeats (LTRs), the foreign DNA to be transferred and a packaging sequence (y). This retroviral vector will not reproduce by itself because the genes which encode structural and envelope proteins are not included within the vector genome. The PCL contains genes encoding the gag, pol, and env proteins, but does not contain the packaging signal “y.” Thus, a PCL can only form empty virion particles by itself. Within this general method, the retroviral vector is introduced into the PCL, thereby creating a vector-producing cell line (VCL). This VCL manufactures virion particles containing only the foreign genome of the retroviral vector, and therefore has previously been considered to be a safe retrovirus vector for therapeutic use.

[0134] A “retroviral vector construct” refers to an assembly which, in preferred embodiments of the invention, is capable of directing the expression of a sequence(s) or gene(s) of interest, such as a PIMS-encoding nucleic acid sequence. Briefly, the retroviral vector construct must include a 5′ LTR, a tRNA binding site, a packaging signal, an origin of second-strand DNA synthesis and a 3′ LTR. A wide variety of heterologous sequences may be included within the vector construct including, for example, sequences which encode a protein (e.g., cytotoxic protein, disease-associated antigen, immune accessory molecule, or replacement protein), or which are useful as a molecule itself (e.g., as a ribozyme or antisense sequence).

[0135] Retroviral vector constructs of the present invention may be readily constructed from a wide variety of retroviruses, including for example, B, C, and D type retroviruses as well as spumaviruses and lentiviruses (see, e.g., RNA Tumor Viruses, Second Edition, Cold Spring Harbor Laboratory, 1985). Such retroviruses may be readily obtained from depositories or collections such as the American Type Culture Collection (“ATCC”; Rockville, Md.), or isolated from known sources using commonly available techniques. Any of the above retroviruses may be readily utilized in order to assemble or construct retroviral vector constructs, packaging cells, or producer cells of the invention, given the disclosure provided herein and standard recombinant techniques (e.g., Sambrook et al, Molecular Cloning: A Laboratory Manual, 2d ed., Cold Spring Harbor Laboratory Press, 1989; Kunkle, 1985 Proc. Natl. Acad. Sci. (USA) 82:488).

[0136] Suitable promoters for use in viral vectors generally may include, but are not limited to, the retroviral LTR; the SV40 promoter; and the human cytomegalovirus (CMV) promoter described in Miller, et al., 1989 Biotechniques 7:980 990, or any other promoter (e.g., cellular promoters such as eukaryotic cellular promoters including, but not limited to, the histone, pol III, and β-actin promoters). Other viral promoters that may be employed include, but are not limited to, adenovirus promoters, thymidine kinase (TK) promoters, and B19 parvovirus promoters. The selection of a suitable promoter will be apparent to those skilled in the art from the teachings contained herein, and may be from among either regulated promoters or promoters as described above.

[0137] The retroviral plasmid vector is employed to transduce packaging cell lines to form producer cell lines. Examples of packaging cells which may be transfected include, but are not limited to, the PE501, PA317, ψ-2, ψ-AM, PA12, T19-14X, VT-19-17-H2, ψCRE, ψCRIP, GP+E-86, GP+envAm12, and DAN cell lines as described in Miller, Human Gene Therapy, 1:5-14 (1990). The vector may transduce the packaging cells through any means known in the art. Such means include, but are not limited to, electroporation, the use of liposomes, and Ca.PO₄ precipitation. In one alternative, the retroviral plasmid vector may be encapsulated into a liposome, or coupled to a lipid, and then administered to a host.

[0138] The producer cell line generates infectious retroviral vector particles which include the nucleic acid sequence(s) encoding the PIMS. Such retroviral vector particles then may be employed to transduce eukaryotic cells, either in vitro or in vivo. The transduced eukaryotic cells will express the nucleic acid sequence(s) encoding the protein or polypeptide. Eukaryotic cells that may be transduced include, but are not limited to, embryonic stem cells, as well as hematopoietic stem cells, hepatocytes, fibroblasts, circulating peripheral blood mononuclear and polymorphonuclear cells including myelomonocytic cells, lymphocytes, myoblasts, tissue macrophages, dendritic cells, Kupffer cells, lymphoid and reticuloendothelial cells of the lymph nodes and spleen, keratinocytes, endothelial cells, and bronchial epithelial cells.

### Host Cells

[0139] A further aspect of the invention provides a host cell transformed or transfected with, or otherwise containing, any of the polynucleotides or cloning/expression constructs of the invention. The polynucleotides and cloning/expression constructs are introduced into suitable cells using any method known in the art, including transformation, transfection and transduction. Host cells include the cells of a subject undergoing ex vivo cell therapy including, for example, ex vivo gene therapy. Eukaryotic host cells contemplated as an aspect of the invention when harboring a polynucleotide, vector, or protein according to the invention include, in addition to a subject's own cells (e.g., a human patient's own cells), VERO cells, HeLa cells, Chinese hamster ovary (CHO) cell lines (including modified CHO cells capable of modifying the glycosylation pattern of expressed PIMS, see Published US Patent Application No. 2003/0115614 A1), incorporated herein by reference, COS cells (such as COS-7), W138, BHK, HepG2, 3T3, RIN, MDCK, A549, PC12, K562, HEK293 cells, HepG2 cells, N cells, 3T3 cells, Spodoptera frugiperda cells (e.g., Sf9 cells), Saccharomyces cerevisiae cells, and any other eukaryotic cell known in the art to be useful in expressing, and optionally isolating, a protein or peptide according to the invention. Also contemplated are prokaryotic cells, including but not limited to, Escherichia coli, Bacillus subtilis, Salmonella typhimurium, a Streptomycete, or any prokaryotic cell known in the art to be suitable for expressing, and optionally isolating, a protein or peptide according to the invention. In isolating protein or peptide from prokaryotic cells, in particular, it is contemplated that techniques known in the art for extracting protein from inclusion bodies may be used. The selection of an appropriate host is within the scope of those skilled in the art from the teachings herein.

[0140] The engineered host cells can be cultured in a conventional nutrient medium modified as appropriate for activating promoters, selecting transformants, or amplifying particular genes. The culture conditions for particular host cells selected for expression, such as temperature, pH and the like, will be readily apparent to the ordinarily skilled artisan. Various mammalian cell culture systems can also be employed to express recombinant protein. Examples of mammalian expression systems include the COS-7 lines of monkey kidney fibroblasts, described by Gluzman, 1981 Cell 23:175, and other cell lines capable of expressing a compatible vector, for example, the C127, 3T3, CHO, HeLa and BHK cell lines. Mammalian expression vectors will comprise an origin of replication, a suitable promoter, and optionally, enhancer, and also any necessary ribosome binding sites, polyadenylation site, splice donor and acceptor sites, transcriptional termination sequences, and 5′ flanking nontranscribed sequences, for example as described herein regarding the preparation of PIMS expression constructs. DNA sequences derived from the SV40 splice, and polyadenylation sites may be used to provide the required nontranscribed genetic elements. Introduction of the construct into the host cell can be effected by a variety of methods with which those skilled in the art will be familiar, including but not limited to, calcium phosphate transfection, DEAE-Dextran-mediated transfection, or electroporation (Davis et al., 1986 Basic Methods in Molecular Biology).

[0141] In one embodiment, a host cell is transduced by a recombinant viral construct directing the expression of a protein or polypeptide according to the invention. The transduced host cell produces viral particles containing expressed protein or polypeptide derived from portions of a host cell membrane incorporated by the viral particles during viral budding.

### Pharmaceutical Compositions

[0142] In some embodiments, the compositions of the invention, such as a PIMS or a composition comprising a polynucleotide encoding such a protein as described herein, are suitable to be administered under conditions and for a time sufficient to permit expression of the encoded protein in a host cell in vivo or in vitro, for gene therapy, and the like. Such compositions may be formulated into pharmaceutical compositions for administration according to well known methodologies. Pharmaceutical compositions generally comprise one or more recombinant expression constructs, and/or expression products of such constructs, in combination with a pharmaceutically acceptable carrier, excipient or diluent. Such carriers will be nontoxic to recipients at the dosages and concentrations employed. For nucleic acid-based formulations, or for formulations comprising expression products according to the invention, about 0.01 μg/kg to about 100 mg/kg body weight will be administered, for example, by the intradermal, subcutaneous, intramuscular or intravenous route, or by any route known in the art to be suitable under a given set of circumstances. A preferred dosage, for example, is about 1 μg/kg to about 1 mg/kg, with about 5 μg/kg to about 200 μg/kg particularly preferred.

[0143] It will be evident to those skilled in the art that the number and frequency of administration will be dependent upon the response of the host. Pharmaceutically acceptable carriers for therapeutic use are well known in the pharmaceutical art, and are described, for example, in Remington's Pharmaceutical Sciences, Mack Publishing Co. (A. R. Gennaro edit. 1985). For example, sterile saline and phosphate buffered saline at physiological pH may be used. Preservatives, stabilizers, dyes and the like may be provided in the pharmaceutical composition. For example, sodium benzoate, sorbic acid and esters of p-hydroxybenzoic acid may be added as preservatives. Id. at 1449. In addition, antioxidants and suspending agents may be used. Id. The compounds of the present invention may be used in either the free base or salt forms, with both forms being considered as being within the scope of the present invention.

[0144] The pharmaceutical compositions that contain one or more nucleic acid constructs of the invention, or the proteins corresponding to the products encoded by such nucleic acid constructs, may be in any form which allows for the composition to be administered to a patient. For example, the composition may be in the form of a solid, liquid or gas (aerosol). Typical routes of administration include, without limitation, oral, topical, parenteral, buccal, sublingual, rectal, vaginal, and intranasal. The term parenteral as used herein includes subcutaneous injections, intravenous, intramuscular, intrasternal, intracavernous, intrathecal, intrameatal, intraurethral injection or infusion techniques. The pharmaceutical composition is formulated so as to allow the active ingredients contained therein to be bioavailable upon administration of the composition to a patient. Compositions that will be administered to a patient take the form of one or more dosage units, where for example, a tablet may be a single dosage unit, and a container of one or more compounds of the invention in aerosol form may hold a plurality of dosage units.

[0145] For oral administration, an excipient and/or binder may be present. Examples are sucrose, kaolin, glycerin, starch dextrins, sodium alginate, carboxymethylcellulose and ethyl cellulose. Coloring and/or flavoring agents may be present. A coating shell may be employed.

[0146] The composition may be in the form of a liquid, e.g., an elixir, syrup, solution, emulsion or suspension. The liquid may be for oral administration or for delivery by injection, as two examples. When intended for oral administration, preferred compositions contain, in addition to one or more PIMS construct or expressed product, one or more of a sweetening agent, preservatives, dye/colorant and flavor enhancer. In a composition intended to be administered by injection, one or more of a surfactant, preservative, wetting agent, dispersing agent, suspending agent, buffer, stabilizer and isotonic agent may be included.

[0147] A liquid pharmaceutical composition as used herein, whether in the form of a solution, suspension or other like form, may include one or more of the following compounds: sterile diluents such as water for injection, saline solution, preferably physiological saline, Ringer's solution, isotonic sodium chloride, fixed oils such as synthetic mono or digylcerides which may serve as the solvent or suspending medium, polyethylene glycols, glycerin, propylene glycol or other solvents; antibacterial agents such as benzyl alcohol or methyl paraben; antioxidants such as ascorbic acid or sodium bisulfite; chelating agents such as ethylenediaminetetraacetic acid; buffers such as acetates, citrates or phosphates, agents for the adjustment of tonicity such as sodium chloride or dextrose, and any adjuvant known in the art. Examples of immunostimulatory substances (adjuvants) include N-acetylmuramyl-L-alanine-D-isoglutamine (MDP), lipopolysaccharides (LPS), glucan, IL 12, GM CSF, gamma interferon and IL 15. The parenteral preparation can be enclosed in ampoules, disposable syringes or multiple-dose vials made of glass or plastic. An injectable pharmaceutical composition is preferably sterile.

[0148] It may also be desirable to include other components in the preparation, such as delivery vehicles including, but not limited to, aluminum salts, water-in-oil emulsions, biodegradable oil vehicles, oil-in-water emulsions, biodegradable microcapsules, and liposomes. Examples of immunostimulatory substances (adjuvants) for use in such vehicles are identified above.

[0149] While any suitable carrier known to those of ordinary skill in the art may be employed in the pharmaceutical compositions of this invention, the type of carrier will vary depending on the mode of administration and whether a sustained release is desired. For parenteral administration, such as subcutaneous injection, the carrier preferably comprises water, saline, alcohol, a fat, a wax or a buffer. For oral administration, any of the above carriers or a solid carrier, such as mannitol, lactose, starch, magnesium stearate, sodium saccharine, talcum, cellulose, glucose, sucrose, and magnesium carbonate, may be employed. Biodegradable microspheres (e.g., polylactic galactide) may also be employed as carriers for the pharmaceutical compositions of this invention. Suitable biodegradable microspheres are disclosed, for example, in U.S. Pat. Nos. 4,897,268 and 5,075,109, incorporated herein by reference. In this regard, it is preferable that the microsphere be larger than approximately 25 microns.

[0150] Pharmaceutical compositions may also contain diluents such as buffers, antioxidants such as ascorbic acid, low molecular weight (less than about 10 residues) polypeptides, proteins, amino acids, carbohydrates (e.g., glucose, sucrose or dextrins), chelating agents (e.g., EDTA), glutathione and other stabilizers and excipients. Neutral buffered saline or saline mixed with nonspecific serum albumin are exemplary appropriate diluents. Preferably, product is formulated as a lyophilizate using appropriate excipient solutions (e.g., sucrose) as diluents.

[0151] The pharmaceutical compositions according to the invention also include stabilized proteins and stable liquid pharmaceutical formulations in accordance with technology known in the art, including the technology disclosed in Published US Patent Application No. 2006/0008415 A1, incorporated herein by reference. Such technologies include derivatization of a protein, wherein the protein comprises a thiol group coupled to N-acetyl-L-cysteine, N-ethyl-maleimide, or cysteine.

[0152] As described above, the subject invention includes compositions capable of delivering nucleic acid molecules encoding PIMS molecules. Such compositions include recombinant viral vectors, e.g., retroviruses (see WO 90/07936, WO 91/02805, WO 93/25234, WO 93/25698, and WO 94/03622), adenovirus (see Berkner, 1988 Biotechniques 6:616-627; Li et al., 1993 Hum. Gene Ther. 4:403-409; Vincent et al., Nat. Genet. 5:130-134; and Kolls et al., 1994 Proc. Natl. Acad. Sci. USA 91:215-219), pox virus (see U.S. Pat. No. 4,769,330; U.S. Pat. No. 5,017,487; and WO 89/01973)), recombinant expression construct nucleic acid molecules complexed to a polycationic molecule (see WO 93/03709), and nucleic acids associated with liposomes (see Wang et al., 1987 Proc. Natl. Acad. Sci. USA 84:7851). In certain embodiments, the DNA may be linked to killed or inactivated adenovirus (see Curiel et al., 1992 Hum. Gene Ther. 3:147-154; Cotton et al., 1992 Proc. Natl. Acad. Sci. USA 89:6094). Other suitable compositions include DNA-ligand (see Wu et al., 1989 J. Biol. Chem. 264:16985-16987) and lipid-DNA combinations (see Felgner et al., 1989 Proc. Natl. Acad. Sci. USA 84:7413-7417).

[0153] In addition to direct in vivo procedures, ex vivo procedures may be used in which cells are removed from a host (e.g., a subject, such as a human patient), modified, and placed into the same or another host animal. It will be evident that one can utilize any of the compositions noted above for introduction of constructs of the invention, either the proteins/polypeptides or the nucleic acids encoding them into tissue cells in an ex vivo context. Protocols for viral, physical and chemical methods of uptake are well known in the art.

### Generation of Antibodies

[0154] Polyclonal antibodies directed toward an antigen polypeptide generally are produced in animals (e.g., rabbits, hamsters, goats, sheep, horses, pigs, rats, gerbils, guinea pigs, mice, or any other suitable mammal, as well as other non-mammal species) by means of multiple subcutaneous or intraperitoneal injections of antigen polypeptide or a fragment thereof and an adjuvant. Adjuvants include, but are not limited to, complete or incomplete Freund's adjuvant, mineral gels such as aluminum hydroxide, and surface active substances such as lysolecithin, pluronic polyols, polyanions, peptides, oil emulsions, and dinitrophenol. BCG (bacilli Calmette-Guerin) and Corynebacterium parvum are also potentially useful adjuvants. It may be useful to conjugate an antigen polypeptide to a carrier protein that is immunogenic in the species to be immunized; typical carriers include keyhole limpet hemocyanin, serum albumin, bovine thyroglobulin, or soybean trypsin inhibitor. Also, aggregating agents such as alum are used to enhance the immune response. After immunization, the animals are bled and the serum is assayed for anti-antigen polypeptide antibody titer using conventional techniques. Polyclonal antibodies may be utilized in the sera from which they were detected, or may be purified from the sera using, e.g., antigen affinity chromatography.

[0155] Monoclonal antibodies directed toward antigen polypeptides are produced using any method which provides for the production of antibody molecules by continuous cell lines in culture. For example, monoclonal antibodies may be made by the hybridoma method as described in Kohler et al., Nature 256:495 [975]; the human B-cell hybridoma technique (Kosbor et al., Immunol Today 4:72, 1983; Cote et al., Proc Natl Acad Sci 80: 2026-2030, 1983) and the EBV-hybridoma technique (Cole et al., Monoclonal Antibodies and Cancer Therapy, Alan R Liss Inc, New York N.Y., pp 77-96, (1985).

[0156] When the hybridoma technique is employed, myeloma cell lines may be used. Cell lines suited for use in hybridoma-producing fusion procedures preferably do not produce endogenous antibody, have high fusion efficiency, and exhibit enzyme deficiencies that render them incapable of growing in certain selective media which support the growth of only the desired fused cells (hybridomas). For example, where the immunized animal is a mouse, one may use P3-X63/Ag8, P3-X63-Ag8.653, NS1/1.Ag 4 1, Sp210-Ag14, FO, NSO/U, MPC-11, MPC11-X45-GTG 1.7 and S194/5XXO Bul; for rats, one may use R210.RCY3, Y3-Ag 1.2.3, IR983F and 4B210; and U-266, GM1500-GRG2, LICR-LON-HMy2 and UC729-6 are all useful in connection with cell fusions.

[0157] In an alternative embodiment, human antibodies can be produced from phage-display libraries (Hoogenboom et al., J. Mol. Biol. 227: 381 [1991]; Marks et al., J. Mol. Biol. 222: 581, see also U.S. Pat. No. 5,885,793).). These processes mimic immune selection through the display of antibody repertoires on the surface of filamentous bacteriophage, and subsequent selection of phage by their binding to an antigen of choice. One such technique is described in PCT Application No. PCT/US98/17364, filed in the name of Adams et al., which describes the isolation of high affinity and functional agonistic antibodies for MPL- and msk-receptors using such an approach. In this approach, a complete repertoire of human antibody genes can be created by cloning naturally rearranged human V genes from peripheral blood lymphocytes as previously described (Mullinax, et al., Proc. Natl. Acad. Sci. (USA) 87: 8095-8099 [1990]).

[0158] Alternatively, an entirely synthetic human heavy chain repertoire can be created from unrearranged V gene segments by assembling each human V_{H} segment with D segments of random nucleotides together with a human J segment (Hoogenboom, et al., J. Mol. Biol. 227:381-388 [1992]). Likewise, a light chain repertoire can be constructed by combining each human V segment with a J segment (Griffiths, et al, EMBO J. 13:3245-3260). Nucleotides encoding the complete antibody (i.e., both heavy and light chains) are linked as a single chain Fv fragment and this polynucleotide is ligated to a nucleotide encoding a filamentous phage minor coat protein. When this fusion protein is expressed on the surface of the phage, a polynucleotide encoding a specific antibody can be identified by selection using an immobilized antigen.

[0159] Beyond the classic methods of generating polyclonal and monoclonal antibodies, any method for generating any known antibody form is contemplated. In addition to polyclonals and monoclonals, antibody forms include chimerized antibodies, humanized antibodies, CDR-grafted antibodies, and antibody fragments and variants.

### Variants and Derivatives of Specific Binding Agents

[0160] In one example, insertion variants are provided wherein one or more amino acid residues supplement the sequence of a specific binding domain. Insertions may be located at either or both termini of the protein, or may be positioned within internal regions of the specific binding domain. Variant products of the invention also include mature PIMS wherein leader or signal sequences are removed, with the resulting protein having additional amino terminal residues. The additional amino terminal residues may be derived from another protein, or may include one or more residues that are not identifiable as being derived from a specific protein. Polypeptides with an additional methionine residue at position −1 (e.g., Met-1-PIMS) are contemplated, as are polypeptides of the invention with additional methionine and lysine residues at positions −2 and −1 (Met-2-Lys-1-PIMS). The parenthetical designations emphasize the feature being described (i.e., N-terminal residues), and are not meant to define PIMS as molecules lacking such N-termini. Each of Met-1-PIMS and MET-2-Lys-1-PIMS are, in fact, PIMS. Variants of the polypeptides of the invention having additional Met, Met-Lys, or Lys residues (or one or more basic residues in general) are particularly useful for enhanced recombinant protein production in bacterial host cells.

[0161] The invention also embraces specific polypeptides of the invention having additional amino acid residues which arise from use of specific expression systems. For example, use of commercially available vectors that express a desired polypeptide as part of a glutathione-5-transferase (GST) fusion product provides the desired polypeptide having an additional glycine residue at position −1 after cleavage of the GST component from the desired polypeptide. Variants which result from expression in other vector systems are also contemplated, including those wherein histidine tags are incorporated into the amino acid sequence, generally at the carboxy and/or amino terminus of the sequence.

[0162] In another aspect, the invention provides deletion variants wherein one or more amino acid residues in a polypeptide of the invention are removed. Deletions can be effected at one or both termini of the polypeptide, or by removal of one or more residues from within the amino acid sequence. Deletion variants necessarily include all fragments of a polypeptide according to the invention.

[0163] Antibody fragments refer to polypeptides having a sequence corresponding to at least part of an immunoglobulin variable region sequence. Fragments may be generated, for example, by enzymatic or chemical cleavage of polypeptides corresponding to full-length antibodies. Other binding fragments include those generated by synthetic techniques or by recombinant DNA techniques, such as the expression of recombinant plasmids containing nucleic acid sequences encoding partial antibody variable regions. Preferred polypeptide fragments display immunological properties unique to, or specific for, a target as described herein. Fragments of the invention having the desired immunological properties can be prepared by any of the methods well known and routinely practiced in the art.

[0164] In still another aspect, the invention provides substitution variants of PIMS. Substitution variants include those polypeptides wherein one or more amino acid residues in an amino acid sequence are removed and replaced with alternative residues. In some embodiments, the substitutions are conservative in nature; however, the invention embraces substitutions that ore also non-conservative. Amino acids can be classified according to physical properties and contribution to secondary and tertiary protein structure. A conservative substitution is recognized in the art as a substitution of one amino acid for another amino acid that has similar properties. Exemplary conservative substitutions are set out in Table A (see WO 97/09433, page 10, published Mar. 13, 1997 (PCT/GB96/02197, filed Sep. 6, 1996), immediately below.

TABLE A
Conservative Substitutions I
SIDE CHAIN CHARACTERISTIC AMINO ACID

| | | |
|---|---|---|
| Aliphatic | Non-polar | G A P I L V |
| | Polar - uncharged | S T M N Q |
| | Polar - charged | D E K R |
| Aromatic | | H F W Y |
| Other | | N Q D E |

[0165] Alternatively, conservative amino acids can be grouped as described in Lehninger, [Biochemistry, Second Edition; Worth Publishers, Inc. NY:NY (1975), pp. 71-77] as set out in Table B, immediately below.

TABLE B
Conservative Substitutions II

| | SIDE CHAIN | |
|---|---|---|
| TYPE | CHARACTERISTIC | AMINO ACID |
| Non-polar | A. Aliphatic: | A L I V P |
| (hydrophobic) | B. Aromatic | F W |
| | C. Sulfur-containing | M |
| | D. Borderline | G |
| Uncharged-polar | A. Hydroxyl | S T Y |
| | B. Amides | N Q |
| | C. Sulfhydryl | C |
| | D. Borderline | G |
| Positively Charged | | K R H |
| (Basic) | | |
| Negatively Charged | | D E |
| (Acidic) | | |

| | | |
|---|---|---|
| SIDE CHAIN | CHARACTERISTIC | AMINO ACID |

| | | |
|---|---|---|
| Non-polar | A. Aliphatic: | A L I V P |
| (hydrophobic) | B. Aromatic: | F W |
| | C. Sulfur-containing: | M |
| | D. Borderline: | G |
| Uncharged-polar | A. Hydroxyl: | S T Y |
| | B. Amides: | N Q |
| | C. Sulfhydryl: | C |
| | D. Borderline: | G |
| Positively Charged | | K R H |
| (Basic) | | |
| Negatively Charged | | D E |
| (Acidic) | | |

[0166] The invention also provides derivatives of PIMS polypeptides. Derivatives include PIMS polypeptides bearing modifications other than insertion, deletion, or substitution of amino acid residues. Preferably, the modifications are covalent in nature and include, for example, chemical bonding with polymers, lipids, other organic, and inorganic moieties. Derivatives of the invention may be prepared to increase circulating half-life of a specific PIMS polypeptide, or may be designed to improve targeting capacity for the polypeptide to desired cells, tissues, or organs.

[0167] The invention further embraces PIMS that are covalently modified or derivatized to include one or more water-soluble polymer attachments such as polyethylene glycol, polyoxyethylene glycol, or polypropylene glycol, as described U.S. Pat. Nos. 4,640,835, 4,496,689, 4,301,144, 4,670,417, 4,791,192 and 4,179,337. Still other useful polymers known in the art include monomethoxy-polyethylene glycol, dextran, cellulose, and other carbohydrate-based polymers, poly-(N-vinyl pyrrolidone)-polyethylene glycol, propylene glycol homopolymers, a polypropylene oxide/ethylene oxide co-polymer, polyoxyethylated polyols (e.g., glycerol) and polyvinyl alcohol, as well as mixtures of these polymers. Particularly preferred are polyethylene glycol (PEG)-derivatized proteins. Water-soluble polymers may be bonded at specific positions, for example at the amino terminus of the proteins and polypeptides according to the invention, or randomly attached to one or more side chains of the polypeptide. The use of PEG for improving therapeutic capacities is described in U.S. Pat. No. 6,133,426 to Gonzales, et al.

### Target Sites for Immunoglobulin Mutagenesis

[0168] Certain strategies are available to manipulate inherent properties of an antigen-specific immunoglobulin (e.g., an antibody) that are not available to non-immunoglobulin-based binding molecules. A good example of the strategies favoring, e.g., antibody-based molecules, over these alternatives is the in vivo modulation of the affinity of an antibody for its target through affinity maturation, which takes advantage of the somatic hypermutation of immunoglobulin genes to yield antibodies of increasing affinity as an immune response progresses. Additionally, recombinant technologies have been developed to alter the structure of immunoglobulins and immunoglobulin regions and domains. Thus, polypeptides derived from antibodies may be produced that exhibit altered affinity for a given antigen, and a number of purification protocols and monitoring screens are known in the art for identifying and purifying or isolating these polypeptides. Using these known techniques, polypeptides comprising antibody-derived binding domains can be obtained that exhibit decreased or increased affinity for an antigen. Strategies for generating the polypeptide variants exhibiting altered affinity include the use of site-specific or random mutagenesis of the DNA encoding the antibody to change the amino acids present in the protein, followed by a screening step designed to recover antibody variants that exhibit the desired change, e.g., increased or decreased affinity relative to the unmodified parent or referent antibody.

[0169] The amino acid residues most commonly targeted in mutagenic strategies to alter affinity are those in the complementarity-determining region (CDR) or hyper-variable region of the light and the heavy chain variable regions of an antibody. These regions contain the residues that physicochemically interact with an antigen, as well as other amino acids that affect the spatial arrangement of these residues. However, amino acids in the framework regions of the variable domains outside the CDR regions have also been shown to make substantial contributions to the antigen-binding properties of an antibody, and can be targeted to manipulate such properties. See Hudson, P. J. Curr. Opin. Biotech., 9: 395-402 (1999) and references therein.

[0170] Smaller and more effectively screened libraries of antibody variants can be produced by restricting random or site-directed mutagenesis to sites in the CDRs that correspond to areas prone to “hyper-mutation” during the somatic affinity maturation process. See Chowdhury, et al., Nature Biotech., 17: 568-572 (1999) and references therein. The types of DNA elements known to define hyper-mutation sites in this manner include direct and inverted repeats, certain consensus sequences, secondary structures, and palindromes. The consensus DNA sequences include the tetrabase sequence Purine-G-Pyrimidine-A/T (i.e., A or G-G-C or T-A or T) and the serine codon AGY (wherein Y can be C or T).

[0171] Thus, another aspect of the invention is a set of mutagenic strategies for modifying the affinity of an antibody for its target. These strategies include mutagenesis of the entire variable region of a heavy and/or light chain, mutagenesis of the CDR regions only, mutagenesis of the consensus hypermutation sites within the CDRs, mutagenesis of framework regions, or any combination of these approaches (“mutagenesis” in this context could be random or site-directed). Definitive delineation of the CDR regions and identification of residues comprising the binding site of an antibody can be accomplished though solving the structure of the antibody in question, and the antibody:ligand complex, through techniques known to those skilled in the art, such as X-ray crystallography. Various methods based on analysis and characterization of such antibody crystal structures are known to those of skill in the art and can be employed to approximate the CDR regions. Examples of such commonly used methods include the Kabat, Chothia, AbM and contact definitions.

[0172] The Kabat definition is based on sequence variability and is the most commonly used definition to predict CDR regions. Johnson, et al., Nucleic Acids Research, 28: 214-8 (2000). The Chothia definition is based on the location of the structural loop regions. (Chothia et al., J. Mol. Biol., 196: 901-17 [1986]; Chothia et al., Nature, 342: 877-83 [1989].) The AbM definition is a compromise between the Kabat and Chothia definitions. AbM is an integral suite of programs for antibody structure modeling produced by the Oxford Molecular Group (Martin, et al., Proc. Natl. Acad. Sci. (USA) 86:9268-9272 [1989]; Rees, et al., ABMTM, a computer program for modeling variable regions of antibodies, Oxford, UK; Oxford Molecular, Ltd.). The AbM suite models the tertiary structure of an antibody from primary sequence using a combination of knowledge databases and ab initio methods An additional definition, known as the contact definition, has been recently introduced. See MacCallum et al., J. Mol. Biol., 5:732-45 (1996). This definition is based on an analysis of the available complex crystal structures.

[0173] By convention, the CDR domains in the heavy chain are typically referred to as H1, H2 and H3, and are numbered sequentially in order moving from the amino terminus to the carboxy terminus. The CDR regions in the light chain are typically referred to as L1, L2 and L3, and are numbered sequentially in order moving from the amino terminus to the carboxy terminus.

[0174] The CDR-H1 is approximately 10 to 12 residues in length and typically starts 4 residues after a Cys according to the Chothia and AbM definitions, or typically 5 residues later according to the Kabat definition. The H1 is typically followed by a Trp, typically Trp-Val, but also Trp-Ile, or Trp-Ala. The length of H1 is approximately 10 to 12 residues according to the AbM definition, while the Chothia definition excludes the last 4 residues.

[0175] The CDR-H2 typically starts 15 residues after the end of H1 according to the Kabat and AbM definitions. The residues preceding H2 are typically Leu-Glu-Trp-Ile-Gly but there are a number of variations. H2 is typically followed by the amino acid sequence Lys/Arg-Leu/Ile/Val/Phe/Thr/Ala-Thr/Ser/Ile/Ala. According to the Kabat definition, the length of H2 is approximately 16 to 19 residues, where the AbM definition predicts the length to be typically 9 to 12 residues.

[0176] The CDR-H3 typically starts 33 residues after the end of H2 and is typically preceded by the amino acid sequence Cys-Ala-Arg. H3 is typically followed by the amino acid Gly. The length of H3 ranges from 3 to 25 residues.

[0177] The CDR-L1 typically starts at approximately residue 24 and will typically follow a Cys. The residue after the CDR-L1 is always Trp and will typically begin one of the following sequences: Trp-Tyr-Gln, Trp-Leu-Gln, Trp-Phe-Gln, or Trp-Tyr-Leu. The length of CDR-L1 is approximately 10 to 17 residues.

[0178] The CDR-L2 starts approximately 16 residues after the end of L1. It will generally follow residues Ile-Tyr, Val-Tyr, Ile-Lys or Ile-Phe. The length of CDR-L2 is approximately 7 residues.

[0179] The CDR-L3 typically starts 33 residues after the end of L2 and typically follows a Cys. L3 is typically followed by the amino acid sequence Phe-Gly-XXX-Gly. The length of L3 is approximately 7 to 11 residues.

[0180] Various methods for modifying antibodies have been described in the art, including, e.g., methods of producing humanized antibodies wherein the sequence of the humanized immunoglobulin heavy chain variable region framework is 65% to 95% identical to the sequence of the donor immunoglobulin heavy chain variable region framework. Each humanized immunoglobulin chain will usually comprise, in addition to the CDRs, amino acids from the donor immunoglobulin framework that are, e.g., capable of interacting with the CDRs to affect binding affinity, such as one or more amino acids that are immediately adjacent to a CDR in the donor immunoglobulin or those within about 3 angstroms, as predicted by molecular modeling. The heavy and light chains may each be designed by using any one or all of various position criteria. When combined into an intact antibody, humanized immunoglobulins are substantially non-immunogenic in humans and retain substantially the same affinity as the donor immunoglobulin to the antigen, such as a protein or other compound containing the relevant epitope.

[0181] In one example, methods for the production of antibodies, and antibody fragments, are described that have binding specificity similar to a parent antibody, but which have increased human characteristics. Humanized antibodies are obtained by chain shuffling using, for example, phage display technology and a polypeptide comprising the heavy or light chain variable region of a non-human antibody specific for an antigen of interest, which is then combined with a repertoire of human complementary (light or heavy) chain variable regions. Hybrid pairings which are specific for the antigen of interest are identified and human chains from the selected pairings are combined with a repertoire of human complementary variable domains (heavy or light). In another embodiment, a component of a CDR from a non-human antibody is combined with a repertoire of component parts of CDRs from human antibodies. From the resulting library of antibody polypeptide dimers, hybrids are selected and may be used in a second humanizing shuffling step; alternatively, this second step is eliminated if the hybrid is already of sufficient human character to be of therapeutic value. Methods of modification to increase human character are known in the art.

[0182] Another example is a method for making humanized antibodies by substituting a CDR amino acid sequence for the corresponding human CDR amino acid sequence and/or substituting a FR amino acid sequence for the corresponding human FR amino acid sequences.

[0183] Yet another example provides methods for identifying the amino acid residues of an antibody variable domain that may be modified without diminishing the native affinity of the antigen binding domain while reducing its immunogenicity with respect to a heterologous species and methods for preparing these modified antibody variable regions as useful for administration to heterologous species.

[0184] Modification of an immunoglobulin such as an antibody by any of the methods known in the art is designed to achieve increased or decreased binding affinity for an antigen and/or to reduce immunogenicity of the antibody in the recipient and/or to modulate effector activity levels. In one approach, humanized antibodies can be modified to eliminate glycosylation sites in order to increase affinity of the antibody for its cognate antigen (Co, et al., Mol. Immunol. 30:1361-1367 [1993]). Techniques such as “reshaping,” hyperchimerization,” and “veneering/resurfacing” have produced humanized antibodies with greater therapeutic potential. Vaswami, et al., Annals of Allergy, Asthma, & Immunol 81:105 (1998); Roguska, et al., Prot. Engineer. 9:895-904 (1996)]. See also U.S. Pat. No. 6,072,035, which describes methods for reshaping antibodies. While these techniques diminish antibody immunogenicity by reducing the number of foreign residues, they do not prevent anti-idiotypic and anti-allotypic responses following repeated administration of the antibodies. Alternatives to these methods for reducing immunogenicity are described in Gilliland et al., J. Immunol. 62(6):3663-71 (1999).

[0185] In many instances, humanizing antibodies results in a loss of antigen binding capacity. It is therefore preferable to “back mutate” the humanized antibody to include one or more of the amino acid residues found in the original (most often rodent) antibody in an attempt to restore binding affinity of the antibody. See, for example, Saldanha et al., Mol. Immunol. 36:709-19 (1999).

[0186] Glycosylation of immunoglobulins has been shown to affect effector functions, structural stability, and the rate of secretion from antibody-producing cells (see Leatherbarrow et al., Mol. Immunol. 22:407 (1985), incorporated herein by reference). The carbohydrate groups responsible for these properties are generally attached to the constant regions of antibodies. For example, glycosylation of IgG at Asn 297 in the C_{H2} domain facilitates full capacity of the IgG to activate complement-dependent cytolysis (Tao et al., J. Immunol. 143:2595 (1989)). Glycosylation of IgM at Asn 402 in the C_{H3} domain, for example, facilitates proper assembly and cytolytic activity of the antibody (Muraoka et al., J. Immunol. 142:695 (1989)). Removal of glycosylation sites at positions 162 and 419 in the C_{H1} and C_{H3} domains of an IgA antibody led to intracellular degradation and at least 90% inhibition of secretion (Taylor et al., Wall, Mol. Cell. Biol. 8:4197 (1988)). Accordingly, the molecules of the invention include mutationally altered immunoglobulins exhibiting altered glycosylation patterns by mutation of specific residues in, e.g., a constant sub-region to alter effector function. See Co et al., Mol. Immunol. 30:1361-1367 (1993), Jacquemon et al., J. Thromb. Haemost. 4:1047-1055 (2006), Schuster et al., Cancer Res. 65:7934-7941 (2005), and Warnock et al., Biotechnol Bioeng. 92:831-842 (2005), each incorporated herein by reference.

[0187] The invention also includes PIMS having at least one binding domain that is at least 80%, preferably 90% or 95% or 99% identical in sequence to a known immunoglobulin variable region sequence and which has at least one residue that differs from such immunoglobulin variable region, wherein the changed residue adds a glycosylation site, changes the location of one or more glycosylation site(s), or preferably removes a glycosylation site relative to the immunoglobulin variable region. In some embodiments, the change removes an N-linked glycosylation site in a an immunoglobulin variable region framework, or removes an N-linked glycosylation site that occurs in the immunoglobulin heavy chain variable region framework in the region spanning about amino acid residue 65 to about amino acid residue 85, using the numbering convention of Co et al., J. Immunol. 148: 1149, (1992).

[0188] Any method known in the art is contemplated for producing the PIMS exhibiting altered glycosylation patterns relative to an immunoglobulin referent sequence. For example, any of a variety of genetic techniques may be employed to alter one or more particular residues. Alternatively, the host cells used for production may be engineered to produce the altered glycosylation pattern. One method known in the art, for example, provides altered glycosylation in the form of bisected, non-fucosylated variants that increase ADCC. The variants result from expression in a host cell containing an oligosaccharide-modifying enzyme. Alternatively, the Potelligent technology of BioWa/Kyowa Hakko is contemplated to reduce the fucose content of glycosylated molecules according to the invention. In one known method, a CHO host cell for recombinant immunoglobulin production is provided that modifies the glycosylation pattern of the immunoglobulin Fc region, through production of GDP-fucose. This technology is available to modify the glycosylation pattern of a constant sub-region of a PIMS according to the invention.

[0189] In addition to modifying the binding properties of binding domains, such as the binding domains of immunoglobulins, and in addition to such modifications as humanization, the invention comprehends the modulation of effector function by changing or mutating residues contributing to effector function, such as the effector function of an immunoglobulin constant sub-region. These modifications can be effected using any technique known in the art, such as the approach disclosed in Presta et al., Biochem. Soc. Trans. 30:487-490 (2001), incorporated herein by reference. Exemplary approaches would include the use of the protocol disclosed in Presta et al. to modify specific residues known to affect binding of one or more constant sub-regions to FCγRI, FCγRII, FCγRIII, FCαR, and/or FCεR.

[0190] In another approach, the Xencor XmAb technology is available to engineer constant sub-regions corresponding to Fc domains to enhance cell killing effector function. See Lazar et al., Proc. Natl. Acad. Sci. (USA) 103(11):4005-4010 (2006), incorporated herein by reference. Using this approach, for example, one can generate constant sub-regions optimized for FCγR specificity and binding, thereby enhancing cell killing effector function.

### Production of PIMS

[0191] A variety of expression vector/host systems may be used to contain and express the PIMS of the invention. These systems include, but are not limited to, microorganisms such as bacteria transformed with recombinant bacteriophage, plasmid, cosmid, or other expression vectors; yeast transformed with yeast expression or shuttle vectors; insect cell systems infected with virus expression vectors (e.g., baculovirus); plant cell systems transfected with virus expression vectors (e.g., cauliflower mosaic virus, CaMV; tobacco mosaic virus, TMV) or transformed with bacterial expression vectors (e.g., Ti or pBR322 plasmid); or animal cell systems. Mammalian cells that are useful in recombinant PIMS productions include, but are not limited to, VERO cells, HeLa cells, Chinese hamster ovary (CHO) cells, COS cells (such as COS-7), W138, BHK, HepG2, 3T3, RIN, MDCK, A549, PC12, K562 and HEK293 cells. Exemplary protocols for the recombinant expression of PIMS are described hereinbelow.

[0192] An expression vector can comprise a transcriptional unit comprising an assembly of (1) a genetic element or elements having a regulatory role in gene expression, for example, a promoter, enhancer, or factor-specific binding site, (2) a structural sequence that encodes the PIMS which is transcribed into mRNA and translated into protein, and (3) appropriate transcription and translation initiation and termination sequences. Structural units intended for use in yeast or eukaryotic expression systems preferably include a leader sequence enabling extracellular secretion of translated protein by a host cell. Alternatively, where a recombinant PIMS is expressed without a leader or transport sequence, it may include an amino terminal methionine residue. This residue may or may not be subsequently cleaved from the expressed recombinant protein to provide a final PIMS.

[0193] For example, the PIMS may be recombinantly expressed in yeast using a commercially available expression system, e.g., the Pichia Expression System (Invitrogen, San Diego, Calif.), following the manufacturer's instructions. This system also relies on the pre-pro-alpha sequence to direct secretion, but transcription of the insert is driven by the alcohol oxidase (AOX1) promoter upon induction by methanol. The secreted PIMS peptide may be purified from the yeast growth medium by, e.g., the methods used to purify the peptide from bacterial and mammalian cell supernatants.

[0194] Alternatively, the cDNA encoding the PIMS peptide may be cloned into the baculovirus expression vector pVL1393 (PharMingen, San Diego, Calif.). This vector can be used according to the manufacturer's directions (PharMingen) to infect Spodoptera frugiperda cells in SF9 protein-free medium and to produce recombinant protein. The PIMS protein can be purified and concentrated from the medium using a heparin-Sepharose column (Pharmacia, Piscataway, N.J.). Insect systems for protein expression, such as the SF9 system, are well known to those of skill in the art. In one such system, Autographa californica nuclear polyhedrosis virus (AcNPV) can be used as a vector to express foreign genes in the Spodoptera frugiperda cells or in Trichoplusia larvae. The PIMS peptide coding sequence can be cloned into a nonessential region of the virus, such as the polyhedrin gene, and placed under control of the polyhedrin promoter. Successful insertion of the PIMS peptide will render the polyhedrin gene inactive and produce recombinant virus lacking coat protein. The recombinant viruses can be used to infect S. frugiperda cells or Trichoplusia larvae in which peptide is expressed (Smith et al., J Virol 46: 584, 1983; Engelhard et al., Proc Nat Acad Sci (USA) 91: 3224-7, 1994).

[0195] In another example, the DNA sequence encoding the PIMS peptide can be amplified by PCR and cloned into an appropriate vector, for example, pGEX-3× (Pharmacia, Piscataway, N.J.). The pGEX vector is designed to produce a fusion protein comprising glutathione-5-transferase (GST), encoded by the vector, and a PIMS protein encoded by a DNA fragment inserted into the cloning site of the vector. The primers for the PCR can be generated to include for example, an appropriate cleavage site to facilitate appropriate cloning. Where the PIMS protein fusion moiety is used solely to facilitate expression or is otherwise not desirable as an attachment to the peptide of interest, the recombinant PIMS protein fusion may then be cleaved from the GST portion of the fusion protein. The pGEX-3×/PIMS peptide construct is transformed into E. coli XL-1 Blue cells (Stratagene, La Jolla Calif.), and individual transformants isolated and grown. Plasmid DNA from individual transformants is purified and may be partially sequenced using an automated sequencer to confirm the presence of the desired PIMS protein-encoding nucleic acid insert in the proper orientation.

[0196] The fused PIMS protein, which may be produced as an insoluble inclusion body in the bacteria, can be purified as follows. Host cells can be harvested by centrifugation; washed in 0.15 M NaCl, 10 mM Tris, pH 8, 1 mM EDTA; and treated with 0.1 mg/ml lysozyme (Sigma Chemical Co.) for 15 minutes at room temperature. The lysate can be cleared by sonication, and cell debris can be pelleted by centrifugation for 10 minutes at 12,000 g. The fusion PIMS protein-containing pellet can be resuspended in 50 mM Tris, pH 8, and 10 mM EDTA, layered over 50% glycerol, and centrifuged for 30 minutes at 6000 g. The pellet can be resuspended in standard phosphate buffered saline solution (PBS) free of Mg++ and Ca++. The PIMS protein fusion can be further purified by fractionating the resuspended pellet in a denaturing SDS polyacrylamide gel (Sambrook et al.). The gel is soaked in 0.4 M KCl to visualize the protein, which is excised and electroeluted in gel-running buffer lacking SDS. If the GST/PIMS peptide fusion protein is produced in bacteria as a soluble protein, it can be purified using the GST Purification Module (Pharmacia Biotech).

[0197] The PIMS protein fusion is preferably subjected to digestion to cleave the GST from the PIMS peptide of the invention. The digestion reaction (20-40 μg fusion protein, 20-30 units human thrombin (4000 U/mg (Sigma) in 0.5 ml PBS) can be incubated 16-48 hours at room temperature and loaded on a denaturing SDS-PAGE gel to fractionate the reaction products. The gel can be soaked in 0.4 M KCl to visualize the protein bands. The identity of the protein band corresponding to the expected molecular weight of the PIMS peptide can be confirmed by amino acid sequence analysis using an automated sequencer (Applied Biosystems Model 473A, Foster City, Calif.). Alternatively, the identity can be confirmed by performing HPLC and/or mass spectrometry of the peptides.

[0198] Alternatively, a DNA sequence encoding the PIMS peptide can be cloned into a plasmid containing a desired promoter and, optionally, a leader sequence (see, e.g., Better et al., Science, 240:1041-43, 1988). The sequence of this construct can be confirmed by automated sequencing. The plasmid can then be transformed into a suitable E. coli strain, such as strain MC1061, using standard procedures employing CaCl₂ incubation and heat shock treatment of the bacteria (Sambrook et al.). The transformed bacteria can be grown in LB medium supplemented with carbenicillin or another suitable form of selection as would be known in the art, and production of the expressed protein can be induced by growth in a suitable medium. If present, the leader sequence can effect secretion of the PIMS peptide and be cleaved during secretion. The secreted recombinant protein can be purified from the bacterial culture medium by the methods described hereinbelow.

[0199] Mammalian host systems for the expression of the recombinant protein are well known to those of skill in the art and are preferred systems. Host cell strains can be chosen for a particular ability to process the expressed protein or produce certain post-translation modifications that will be useful in providing protein activity. Such modifications of the polypeptide include, but are not limited to, acetylation, carboxylation, glycosylation, phosphorylation, lipidation and acylation. Different host cells such as CHO, HeLa, MDCK, 293, WI38, and the like, have specific cellular machinery and characteristic mechanisms for such post-translational activities and can be chosen to ensure the correct modification and processing of the foreign protein.

[0200] It is preferable that the transformed cells be used for long-term, high-yield protein production and, as such, stable expression is desirable. Once such cells are transformed with vectors that preferably contain at least one selectable marker along with the desired expression cassette, the cells are grown for 1-2 days in an enriched medium before being switched to selective medium. The selectable marker is designed to confer resistance to selection and its presence allows growth and recovery of cells that successfully express the foreign protein. Resistant clumps of stably transformed cells can be proliferated using tissue culture techniques appropriate to the cell.

[0201] A number of selection systems can be used to recover the cells that have been transformed for recombinant protein production. Such selection systems include, but are not limited to, HSV thymidine kinase, hypoxanthine-guanine phosphoribosyltransferase and adenine phosphoribosyltransferase genes, in tk−, hgprt− or aprt− cells, respectively. Also, anti-metabolite resistance can be used as the basis of selection for dhfr, which confers resistance to methotrexate; gpt, which confers resistance to mycophenolic acid; neo, which confers resistance to the aminoglycoside G418 and confers resistance to chlorsulfuron; and hygro, which confers resistance to hygromycin. Additional selectable genes that may be useful include trpB, which allows cells to utilize indole in place of tryptophan, or hisD, which allows cells to utilize histinol in place of histidine. Markers that give a visual indication for identification of transformants include anthocyanins, β-glucuronidase and its substrate, GUS, and luciferase and its substrate, luciferin.

### Purification of Proteins

[0202] Protein purification techniques are well known to those of skill in the art. These techniques involve, at one level, the crude fractionation of the polypeptide and non-polypeptide fractions. Having separated the PIMS polypeptide from at least one other protein, the PIMS polypeptide is purified, but further purification using chromatographic, electrophoretic, and/or other known techniques to achieve partial or complete purification (or purification to homogeneity) is frequently desired. Analytical methods particularly suited to the preparation of a pure PIMS peptide are ion-exchange chromatography, exclusion chromatography; polyacrylamide gel electrophoresis; and isoelectric focusing. Particularly efficient methods of purifying peptides are fast protein liquid chromatography and HPLC.

[0203] Certain aspects of the present invention concern the purification, and in particular embodiments, the substantial purification, of an encoded PIMS protein or peptide. The term “purified PIMS protein or peptide” as used herein, is intended to refer to a composition, isolatable from other components, wherein the PIMS protein or peptide is purified to any degree relative to its naturally obtainable state. A purified PIMS protein or peptide therefore also refers to a PIMS protein or peptide, free from the environment in which it may naturally occur.

[0204] Generally, “purified” will refer to a PIMS protein composition that has been subjected to fractionation to remove various other components, and which composition substantially retains its expressed biological activity. Where the term “substantially purified” is used, this designation refers to a PIMS protein composition in which the PIMS protein or peptide forms the major component of the composition, such as constituting about 50%, about 60%, about 70%, about 80%, about 90%, about 95%, about 99% or more of the protein, by weight, in the composition.

[0205] Various methods for quantifying the degree of purification of the PIMS protein will be known to those of skill in the art. These include, for example, determining the specific binding activity of an active fraction, or assessing the amount of PIMS polypeptides within a fraction by SDS/PAGE analysis. A preferred method for assessing the purity of a PIMS protein fraction is to calculate the binding activity of the fraction, to compare it to the binding activity of the initial extract, and to thus calculate the degree of purification, herein assessed by a “-fold purification number.” The actual units used to represent the amount of binding activity will, of course, be dependent upon the particular assay technique chosen to follow the purification and whether or not the expressed PIMS protein or peptide exhibits a detectable binding activity.

[0206] Various techniques suitable for use in PIMS protein purification are well known to those of skill in the art. These include, for example, precipitation with ammonium sulfate, PEG, antibodies and the like, or by heat denaturation, followed by centrifugation; chromatography steps such as ion exchange, gel filtration, reverse phase, hydroxylapatite and affinity chromatography; isoelectric focusing; gel electrophoresis; and combinations of these and other known techniques. As is generally known in the art, it is believed that the order of conducting the various purification steps may be changed, or that certain steps may be omitted, and still result in a suitable method for the preparation of a substantially purified PIMS protein.

[0207] There is no general requirement that the PIMS protein always be provided in its most purified state. Indeed, it is contemplated that less substantially purified PIMS proteins will have utility in certain embodiments. Partial purification may be accomplished by using fewer purification steps in combination, or by utilizing different forms of the same general purification scheme. For example, it is appreciated that a cation-exchange column chromatography performed utilizing an HPLC apparatus will generally result in greater purification than the same technique utilizing a low pressure chromatography system. Methods exhibiting a lower degree of relative purification may have advantages in total recovery of PIMS protein product, or in maintaining binding activity of an expressed PIMS protein.

[0208] It is known that the migration of a polypeptide can vary, sometimes significantly, with different conditions of SDS/PAGE (Capaldi et al., Biochem. Biophys. Res. Comm., 76:425, 1977). It will therefore be appreciated that under differing electrophoresis conditions, the apparent molecular weights of purified or partially purified PIMS protein expression products may vary.

### Effector Cells

[0209] Effector cells for inducing, e.g., ADCC against a target cell include human leukocytes, macrophages, monocytes, activated neutrophils, activated natural killer (NK) cells, and eosinophils. Effector cells express FCαR (CD89), FcγRI, FcγRII, FcγRIII, and/or FCεR1 and include, for example, monocytes and activated neutrophils. Expression of FcγRI, e.g., has been found to be up-regulated by interferon gamma (IFN-γ). This enhanced expression increases the cytotoxic activity of monocytes and neutrophils against target cells. Accordingly, effector cells may be activated with (IFN-γ) or other cytokines (e.g., TNF-α or β, colony stimulating factor, IL-2) to increase the presence of FcγRI on the surface of the cells prior to being contacted with a PIMS protein of the invention.

[0210] The PIMS proteins of the invention provide an antibody effector function, such as antibody-dependent effector cell-mediated cytotoxicity (ADCC), for use against a target cell. PIMS proteins with effector function are administered alone, as taught herein, or after being coupled to an effector cell, thereby forming an “activated effector cell.”An “activated effector cell” is an effector cell, as defined herein, linked to a PIMS protein, also as defined herein, such that the effector cell is effectively provided with a targeting function prior to administration.

[0211] Activated effector cells are administered in vivo as a suspension of cells in a physiologically acceptable solution. The number of cells administered is on the order of 10⁸-10⁹, but will vary depending on the therapeutic purpose. In general, the amount will be sufficient to obtain localization of the effector cell at the target cell, and to provide a desired level of effector cell function in that locale, such as cell killing by ADCC and/or phagocytosis. The term “physiologically acceptable solution,” as used herein, is intended to include any carrier solution which stabilizes the targeted effector cells for administration in vivo including, for example, saline and aqueous buffer solutions, solvents, antibacterial and antifungal agents, isotonic agents, and the like.

[0212] Accordingly, another aspect of the invention provides a method of inducing a specific antibody effector function, such as ADCC, against a cell in a subject, comprising administering to the subject the PIMS protein (or encoding nucleic acid) or activated effector cell in a physiologically acceptable medium. Routes of administration can vary and suitable administration routes will be determined by those of skill in the art based on a consideration of case-specific variables and routine procedures, as is known in the art.

### Diseases, Disorders and Conditions

[0213] The invention provides PIMS proteins, and variant and derivative thereof, that bind to one or more binding partners and those binding events are useful in the treatment, prevention, or amelioration of a symptom associated with a disease, disorder or pathological condition, preferably one afflicting humans. In preferred embodiments of these methods, the PIMS protein associates a cell bearing a target, such as a tumor-specific cell-surface marker, with an effector cell, such as a cell of the immune system exhibiting cytotoxic activity. In other embodiments, the PIMS protein having more than one specific binding site specifically binds two different disease-, disorder- or condition-specific cell-surface markers to ensure that the correct target is associated with an effector cell, such as a cytotoxic cell of the immune system. Additionally, the PIMS protein can be used to induce or increase antigen activity, or to inhibit antigen activity. PIMS proteins are also suitable for combination therapies and palliative regimes.

[0214] In one aspect, the present invention provides compositions and methods useful for treating or preventing diseases and conditions characterized by aberrant levels of antigen activity associated with a cell. These diseases include cancers and other hyperproliferative conditions, such as hyperplasia, psoriasis, contact dermatitis, immunological disorders, and infertility. A wide variety of cancers, including solid tumors and leukemias, are amenable to the compositions and methods disclosed herein. Types of cancer that may be treated include, but are not limited to: adenocarcinoma of the breast, prostate, and colon; all forms of bronchogenic carcinoma of the lung; myeloid; melanoma; hepatoma; neuroblastoma; papilloma; apudoma; choristoma; branchioma; malignant carcinoid syndrome; carcinoid heart disease; and carcinoma (e.g., Walker, basal cell, basosquamous, Brown-Pearce, ductal, Ehrlich tumor, Krebs 2, merkel cell, mucinous, non-small cell lung, oat cell, papillary, scirrhous, bronchiolar, bronchogenic, squamous cell, and transitional cell). Additional types of cancers suitable for treatment include: histiocytic disorders; leukemia; histiocytosis malignant; Hodgkin's disease; immunoproliferative small; non-Hodgkin's lymphoma; plasmacytoma; reticuloendotheliosis; melanoma; chondroblastoma; chondroma; chondrosarcoma; fibroma; fibrosarcoma; giant cell tumors; histiocytoma; lipoma; liposarcoma; mesothelioma; myxoma; myxosarcoma; osteoma; osteosarcoma; chordoma; craniopharyngioma; dysgerminoma; hamartoma; mesenchymoma; mesonephroma; myosarcoma; ameloblastoma; cementoma; odontoma; teratoma; thymoma; and trophoblastic tumor. Further, the following types of cancers are also contemplated as amenable to treatment: adenoma; cholangioma; cholesteatoma; cyclindroma; cystadenocarcinoma; cystadenoma; granulosa cell tumor; gynandroblastoma; hepatoma; hidradenoma; islet cell tumor; Leydig cell tumor; papilloma; sertoli cell tumor; theca cell tumor; leimyoma; leiomyosarcoma; myoblastoma; myomma; myosarcoma; rhabdomyoma; rhabdomyosarcoma; ependymoma; ganglioneuroma; glioma; medulloblastoma; meningioma; neurilemmoma; neuroblastoma; neuroepithelioma; neurofibroma; neuroma; paraganglioma; paraganglioma nonchromaffin. The types of cancers that may be treated also include, but are not limited to, angiokeratoma; angiolymphoid hyperplasia with eosinophilia; angioma sclerosing; angiomatosis; glomangioma; hemangioendothelioma; hemangioma; hemangiopericytoma; hemangiosarcoma; lymphangioma; lymphangiomyoma; lymphangiosarcoma; pinealoma; carcinosarcoma; chondrosarcoma; cystosarcoma phyllodes; fibrosarcoma; hemangiosarcoma; leiomyosarcoma; leukosarcoma; liposarcoma; lymphangiosarcoma; myosarcoma; myxosarcoma; ovarian carcinoma; rhabdomyosarcoma; sarcoma; neoplasms; nerofibromatosis; and cervical dysplasia. The invention further provides compositions and methods useful in the treatment of other conditions in which cells have become immortalized or hyperproliferative due to abnormally high expression of antigen.

[0215] Exemplifying the variety of hyperproliferative disorders amenable to the compositions and methods of the invention are B-cell cancers, including B-cell lymphomas (such as various forms of Hodgkin's disease, non-Hodgkins lymphoma (NHL) or central nervous system lymphomas), leukemias (such as acute lymphoblastic leukemia (ALL), chronic lymphocytic leukemia (CLL), Hairy cell leukemia and chronic myoblastic leukemia), and myelomas (such as multiple myeloma). Additional B cell cancers include small lymphocytic lymphoma, B-cell prolymphocytic leukemia, lymphoplasmacytic lymphoma, splenic marginal zone lymphoma, plasma cell myeloma, solitary plasmacytoma of bone, extraosseous plasmacytoma, extra-nodal marginal zone B-cell lymphoma of mucosa-associated (MALT) lymphoid tissue, nodal marginal zone B-cell lymphoma, follicular lymphoma, mantle cell lymphoma, diffuse large B-cell lymphoma, mediastinal (thymic) large B-cell lymphoma, intravascular large B-cell lymphoma, primary effusion lymphoma, Burkitt's lymphoma/leukemia, B-cell proliferations of uncertain malignant potential, lymphomatoid granulomatosis, and post-transplant lymphoproliferative disorder.

[0216] Disorders characterized by autoantibody production are often considered autoimmune diseases. Autoimmune diseases amenable to treatment or symptom amelioration with the compositions and methods of the invention include, but are not limited to, arthritis, rheumatoid arthritis, juvenile rheumatoid arthritis, osteoarthritis, polychondritis, psoriatic arthritis, psoriasis, dermatitis, polymyositis/dermatomyositis, inclusion body myositis, inflammatory myositis, toxic epidermal necrolysis, systemic scleroderma and sclerosis, CREST syndrome, responses associated with inflammatory bowel disease, Crohn's disease, ulcerative colitis, respiratory distress syndrome, adult respiratory distress syndrome (ARDS), meningitis, encephalitis, uveitis, colitis, glomerulonephritis, allergic conditions, eczema, asthma, conditions involving infiltration of T cells and chronic inflammatory responses, atherosclerosis, autoimmune myocarditis, leukocyte adhesion deficiency, systemic lupus erythematosus (SLE), subacute cutaneous lupus erythematosus, discoid lupus, lupus myelitis, lupus cerebritis, juvenile onset diabetes, multiple sclerosis, allergic encephalomyelitis, neuromyelitis optica, rheumatic fever, Sydenham's chorea, immune responses associated with acute and delayed hypersensitivity mediated by cytokines and T-lymphocytes, tuberculosis, sarcoidosis, granulomatosis including Wegener's granulomatosis and Churg-Strauss disease, agranulocytosis, vasculitis (including hypersensitivity vasculitis/angiitis, ANCA and rheumatoid vasculitis), aplastic anemia, Diamond Blackfan anemia, immune hemolytic anemia including autoimmune hemolytic anemia (AIHA), pernicious anemia, pure red cell aplasia (PRCA), Factor VIII deficiency, hemophilia A, autoimmune neutropenia, pancytopenia, leukopenia, diseases involving leukocyte diapedesis, central nervous system (CNS) inflammatory disorders, multiple organ injury syndrome, myasthenia gravis, antigen-antibody complex mediated diseases, anti-glomerular basement membrane disease, anti-phospholipid antibody syndrome, allergic neuritis, Behcet disease, Castleman's syndrome, Goodpasture's syndrome, Lambert-Eaton Myasthenic Syndrome, Reynaud's syndrome, Sjogren's syndrome, Stevens-Johnson syndrome, solid organ transplant rejection, graft-versus-host disease (GVHD), bullous pemphigoid, pemphigus, autoimmune polyendocrinopathies, seronegative spondyloarthropathies, Reiter's disease, stiff-man syndrome, giant cell arteritis, immune complex nephritis, IgA nephropathy, IgM polyneuropathies or IgM mediated neuropathy, idiopathic thrombocytopenic purpura (ITP), thrombotic thrombocytopenic purpura (TTP), Henoch-Schonlein purpura, autoimmune thrombocytopenia, autoimmune disease of the testis and ovary including autoimmune orchitis and oophoritis, primary hypothyroidism; autoimmune endocrine diseases including autoimmune thyroiditis, chronic thyroiditis (Hashimoto's Thyroiditis), subacute thyroiditis, idiopathic hypothyroidism, Addison's disease, Grave's disease, autoimmune polyglandular syndromes (or polyglandular endocrinopathy syndromes), Type I diabetes also referred to as insulin-dependent diabetes mellitus (IDDM) and Sheehan's syndrome; autoimmune hepatitis, lymphoid interstitial pneumonitis (HIV), bronchiolitis obliterans (non-transplant) vs NSIP, Guillain-Barre Syndrome, large-vessel vasculitis (including polymyalgia rheumatica and giant cell (Takayasu's) arteritis), medium vessel vasculitis (including Kawasaki's disease and polyarteritis nodosa), polyarteritis nodosa (PAN) ankylosing spondylitis, Berger's disease (IgA nephropathy), rapidly progressive glomerulonephritis, primary biliary cirrhosis, Celiac sprue (gluten enteropathy), cryoglobulinemia, cryoglobulinemia associated with hepatitis, amyotrophic lateral sclerosis (ALS), coronary artery disease, familial Mediterranean fever, microscopic polyangiitis, Cogan's syndrome, Whiskott-Aldrich syndrome and thromboangiitis obliterans.

[0217] Rheumatoid arthritis (RA) is a chronic disease characterized by inflammation of the joints, leading to swelling, pain, and loss of function. Patients having RA for an extended period usually exhibit progressive joint destruction, deformity, disability and even premature death. Beyond RA, inflammatory diseases, disorders and conditions in general are amenable to treatment, prevention or amelioration of symptoms (e.g., heat, pain, swelling, redness) associated with the process of inflammation, and the compositions and methods of the invention are beneficial in treating, preventing or ameliorating aberrant or abnormal inflammatory processes, including RA.

[0218] Crohn's disease and a related disease, ulcerative colitis, are the two main disease categories that belong to a group of illnesses called inflammatory bowel disease (IBD). Crohn's disease is a chronic disorder that causes inflammation of the digestive or gastrointestinal (GI) tract. Although it can involve any area of the GI tract from the mouth to the anus, it most commonly affects the small intestine and/or colon. In ulcerative colitis, the GI involvement is limited to the colon. Crohn's disease may be characterized by antibodies against neutrophil antigens, i.e., the “perinuclear anti-neutrophil antibody” (pANCA), and Saccharomyces cerevisiae, i.e. the “anti-Saccharomyces cerevisiae antibody” (ASCA). Many patients with ulcerative colitis have the pANCA antibody in their blood, but not the ASCA antibody, while many Crohn's patients exhibit ASCA antibodies, and not pANCA antibodies. One method of evaluating Crohn's disease is using the Crohn's Disease Activity Index (CDAI), based on 18 predictor variable scores collected by physicians. CDAI values of 150 and below are associated with quiescent disease; values above that indicate active disease, and values above 450 are seen with extremely severe disease [Best et al., “Development of a Crohn's disease activity index.” Gastroenterology 70:439-444 (1976)]. However, since the original study, some researchers use a ‘subjective value’ of 200 to 250 as a healthy score.

[0219] Systemic Lupus Erythematosus (SLE) is an autoimmune disease caused by recurrent injuries to blood vessels in multiple organs, including the kidney, skin, and joints. In patients with SLE, a faulty interaction between T cells and B-cells results in the production of autoantibodies that attack the cell nucleus. There is general agreement that autoantibodies are responsible for SLE, so new therapies that deplete the B-cell lineage, allowing the immune system to reset as new B-cells are generated from precursors, would offer hope for long lasting benefit in SLE patients.

[0220] Multiple sclerosis (MS) is also an autoimmune disease. It is characterized by inflammation of the central nervous system and destruction of myelin, which insulates nerve cell fibers in the brain, spinal cord, and body. Although the cause of MS is unknown, it is widely believed that autoimmune T cells are primary contributors to the pathogenesis of the disease. However, high levels of antibodies are present in the cerebral spinal fluid of patients with MS, and some theories predict that the B-cell response leading to antibody production is important for development of the disease.

[0221] Autoimmune thyroid disease results from the production of autoantibodies that either stimulate the thyroid to cause hyperthyroidism (Graves' disease) or destroy the thyroid to cause hypothyroidism (Hashimoto's thyroiditis). Stimulation of the thyroid is caused by autoantibodies that bind and activate the thyroid stimulating hormone (TSH) receptor. Destruction of the thyroid is caused by autoantibodies that react with other thyroid antigens.

[0222] Additional diseases, disorders, and conditions amenable to the benefits provided by the compositions and methods of the invention include the aforementioned Sjogren's syndrome, which is an autoimmune disease characterized by destruction of the body's moisture-producing glands. Further, immune thrombocytopenic purpura (ITP) is caused by autoantibodies that bind to blood platelets and cause their destruction, and this condition is suitable for application of the materials and methods of the invention. Myasthenia Gravis (MG), a chronic autoimmune neuromuscular disorder characterized by autoantibodies that bind to acetylcholine receptors expressed at neuromuscular junctions leading to weakness of the voluntary muscle groups, is a disease having symptoms that are treatable using the composition and methods of the invention, and it is expected that the invention will be beneficial in treating and/or preventing MG. Still further, Rous Sarcoma Virus infections are expected to be amenable to treatment, or amelioration of at least one symptom, with the compositions and methods of the invention.

[0223] Another aspect of the present invention is using the materials and methods of the invention to prevent and/or treat any hyperproliferative condition of the skin including psoriasis and contact dermatitis or other hyperproliferative diseases. Psoriasis is characterized by autoimmune inflammation in the skin and is also associated with arthritis in 30% of cases, as well as scleroderma, and inflammatory bowel disease (including Crohn's disease and ulcerative colitis). It has been demonstrated that patients with psoriasis and contact dermatitis have elevated antigen activity within these lesions (Ogoshi et al., J. Inv. Dermatol., 110:818-23 [1998]).

[0224] The PIMS proteins can deliver a cytotoxic cell of the immune system, for example, directly to cells within the lesions expressing high levels of antigen. The PIMS proteins can be administered subcutaneously in the vicinity of the lesions, or by using any of the various routes of administration described herein and others which are well known to those of skill in the art.

[0225] Also contemplated is the treatment of idiopathic inflammatory myopathy (IIM), including dermatomyositis (DM) and polymyositis (PM). Inflammatory myopathies have been categorized using a number of classification schemes. Miller's classification schema (Miller, Rheum Dis Clin North Am. 20:811-826, 1994) identifies 2 idiopathic inflammatory myopathies (IIM), polymyositis (PM) and dermatomyositis (DM).

[0226] Polymyositis and dermatomyositis are chronic, debilitating inflammatory diseases that involve muscle and, in the case of DM, skin. These disorders are rare, with a reported annual incidence of approximately 5 to 10 cases per million adults and 0.6 to 3.2 cases per million children per year in the United States (Targoff, Curr Probl Dermatol. 1991, 3:131-180). Idiopathic inflammatory myopathy is associated with significant morbidity and mortality, with up to half of affected adults noted to have suffered significant impairment (Gottdiener et al., Am J Cardiol. 1978, 41:1141-49). Miller (Rheum Dis Clin North Am. 1994, 20:811-826 and Arthritis and Allied Conditions, Ch. 75, Eds. Koopman and Moreland, Lippincott Williams and Wilkins, 2005) sets out five groups of criteria used to diagnose IIM, i.e., Idiopathic Inflammatory Myopathy Criteria (IIMC) assessment, including muscle weakness, muscle biopsy evidence of degeneration, elevation of serum levels of muscle-associated enzymes, electromagnetic triad of myopathy, evidence of rashes in dermatomyositis, and also evidence of autoantibodies as a secondary criterion.

[0227] IIM-associated factors, including muscle-associated enzymes and autoantibodies include, but are not limited to, creatine kinase (CK), lactate dehydrogenase, aldolase, C-reactive protein, aspartate aminotransferase (AST), alanine aminotransferase (ALT), as well as antinuclear autoantibody (ANA), myositis-specific antibodies (MSA), and antibody to extractable nuclear antigens.

[0228] Preferred autoimmune diseases amenable to the methods of the invention include Crohn's disease, Guillain-Barre syndrome (GBS; also known as acute inflammatory demyelinating polyneuropathy, acute idiopathic polyradiculoneuritis, acute idiopathic polyneuritis and Landry's ascending paralysis), lupus erythematosus, multiple sclerosis, myasthenia gravis, optic neuritis, psoriasis, rheumatoid arthritis, hyperthyroidism (e.g., Graves' disease), hypothyroidism (e.g., Hashimoto's disease), Ord's thyroiditis (a thyroiditis similar to Hashimoto's disease), diabetes mellitus (type 1), aplastic anemia, Reiter's syndrome, autoimmune hepatitis, primary biliary cirrhosis, antiphospholipid antibody syndrome (APS), opsoclonus myoclonus syndrome (OMS), temporal arteritis (also known as “lgiant cell arteritis”), acute disseminated encephalomyelitis (ADEM), Goodpasture's syndrome, Wegener's granulomatosis, coeliac disease, pemphigus, canine polyarthritis, and warm autoimmune hemolytic anemia. In addition, the invention contemplates methods for the treatment, or amelioration of a symptom associated with, endometriosis, interstitial cystitis, neuromyotonia, scleroderma, vitiligo, vulvodynia, Chagas' disease leading to Chagasic cardiopathy (cardiomegaly), sarcoidosis, chronic fatigue syndrome, and dysautonomia

[0229] The complement system is believed to play a role in many diseases with an immune component, such as Alzheimer's disease, asthma, lupus erythematosus, various forms of arthritis, autoimmune heart disease and multiple sclerosis, all of which are contemplated as diseases, disorders or conditions amenable to treatment or symptom amelioration using the methods according to the invention.

[0230] Certain constant sub-regions are preferred, depending on the particular effector function or functions to be exhibited by a multispecific single-chain binding molecule. For example, IgG (IgG1, 2, or 3) and IgM are preferred for complement activation, IgG of any subtype is preferred for opsonization and toxin neutralization; IgA is preferred for pathogen binding; and IgE for binding of such parasites as worms.

[0231] By way of example, FcRs recognizing the constant region of IgG antibodies have been found on human leukocytes as three distinct types of Fcγ receptors, which are distinguishable by structural and functional properties, as well as by antigenic structures detected by anti-CD monoclonal antibodies. They are known as FcγRI, FcγRII, and FcγRIII, and are differentially expressed on (overlapping) subsets of leukocytes.

[0232] FcγRI (CD64), a high-affinity receptor expressed on monocytes, macrophages, neutrophils, myeloid precursors and dendritic cells, comprises isoforms 1a and 1b. FcγRI has a high affinity for monomeric human IgG1 and IgG3. Its affinity for IgG4 is about 10 times lower, while it does not bind IgG2. FcγRI does not show genetic polymorphism.

[0233] FcγRII (CD32), comprised of isoforms lla, llb1, llb2, llb3 and llc, is the most widely distributed human FcγR type, being expressed on most types of blood leukocytes, as well as on Langerhans cells, dendritic cells and platelets. FcγRII is a low-affinity receptor that only binds aggregated IgG. It is the only FcγR class able to bind IgG2. FcγRIIa shows genetic polymorphism, resulting in two distinct allotypes, FcγRIIa-H131 and FcγRIIa-R131. This functional polymorphism is attributable to a single amino acid difference: a histidine (H) or an arginine (R) residue at position 131, respectively, which is critical for IgG binding. FcγRIIa readily binds human IgG subisotypes other than IgG4. The FcγRlla-H131 has a much higher affinity for complexed IgG2 than the FcγRlla-R131 allotype.

[0234] FcγRIII (CD16) has two isoforms, both of which are able to bind IgG1 and IgG3. The FcγRIIIa, with an intermediate affinity for IgG, is expressed on macrophages, monocytes, natural killer (NK) cells, and subsets of T cells. FcγRIIIb is a low-affinity receptor for IgG, selectively expressed on neutrophils. It is a highly mobile receptor with efficient collaboration with other membrane receptors. Studies with myeloma IgG dimers have shown that only IgG1 and IgG3 bind to FcγRIIIb (with low affinity), while no binding of IgG2 and IgG4 has been found. The FcγRIIIb bears a co-dominant, bi-allelic polymorphism, the allotypes being designated NA1 (Neutrophil Antigen) and NA2.

[0235] Yet another aspect of the invention is use of the materials and methods of the invention to combat, by treating, preventing or mitigating the effects of, infection, resulting from any of a wide variety of infectious agents. The PIMS molecules of the invention are designed to efficiently and effectively recruit the host organism's immune system to resist infection arising from a foreign organism, a foreign cell, a foreign virus or a foreign inanimate object.

[0236] Infectious cells contemplated by the invention include any known infectious cell including, but not limited to, any of a variety of bacteria (e.g., pathogenic E. coli, S. typhimurium, P. aeruginosa, B. anthracis, C. botulinum, C. difficile, C. perfringens, H. pylori, V. cholerae, and the like), mycobacteria, mycoplasma, fungi (including yeast and molds), and parasites (including any known parasitic member of the Protozoa, Trematoda, Cestoda and Nematoda). Infectious viruses include, but are not limited to, eukaryotic viruses (e.g., adenovirus, bunyavirus, herpesvirus, papovavirus, paramyxovirus, picornavirus, poxvirus, reovirus, retroviruses, and the like) as well as bacteriophage. Foreign objects include objects entering an organism, preferably a human, regardless of mode of entry and regardless of whether harm is intended. In view of the increasing prevalence of multi-drug-resistant infectious agents (e.g., bacteria), particularly as the causative agents of nosocomial infection, the materials and methods of the invention, providing an approach to treatment that avoids the difficulties imposed by increasing antibiotic resistance, are expected to provide a welcome addition to the medical and veterinary arsenals available to combat these conditions.

[0237] Diseases, conditions or disorders associated with infectious agents and amenable to treatment (prophylactic or therapeutic) with the materials and methods disclosed herein include, but are not limited to, anthrax, aspergillosis, bacterial meningitis, bacterial pneumoniae (e.g., chlamydia pneumoniae), blastomycosis, botulism, brucellosis, candidiasis, cholera, ciccidioidomycosis, cryptococcosis, diahhreagenic, enterohemorrhagic or enterotoxigenic E. coli, diphtheria, glanders, histoplasmosis, legionellosis, leprosy, listeriosis, nocardiosis, pertussis, salmonellosis, scarlet fever, sporotrichosis, strep throat, toxic shock syndrome, traveler's diarrhea, and typhoid fever.

[0238] Additional aspects and details of the invention will be apparent from the following examples, which are intended to be illustrative rather than limiting.

### EXAMPLE 1

### PIMS Construction

[0239] As illustrated in FIG. 1, a PIMS peptide has the following structural domains: an N-terminally disposed constant sub-region and at least one C-terminally disposed specific binding site, with each of these two domains linked by a PIMS linker that may be derived from an immunoglobulin hinge. In some embodiments, a hinge region derived from an immunoglobulin is located N-terminal to the constant sub-region, although the constant sub-region is still disposed N-terminally to the specific binding site(s). In some embodiments, the N-terminus of the nascently expressed PIMS molecule may be a leader peptide, as would be known in the art to be useful in expression and secretion of an encoded peptide. This leader peptide, moreover, may be covalently joined to a region derived from an immunoglobulin hinge or directly to a constant sub-region (PIMS molecules lacking an N-terminal domain derived from a hinge region).

[0240] Recombinant engineering of vehicles for PIMS-encoding polynucleotides is expected to facilitate construction of these various PIMS molecules, for example by directed placement of suitable restriction endonuclease cleavage sites. In addition to generating a repertoire of PIMS polynucleotides and encoded PIMS peptides by recombinant engineering, it is contemplated that various mutagenic techniques, including site-directed mutagenesis, will be used to produce a variety of PIMS and variants thereof. For example, site-directed mutagenesis is suitable for altering the codons specifying cysteine residues capable of participating in inter-chain disulfide bond formation. Typically, such Cys residues would be located in the linker region joining the constant sub-region and at least one specific binding site, and/or in an N-terminal hinge region. Exemplary hinges include regions derived from IgG1 hinges, wherein the derived hinge region has a single Cys residue or has two Cys residues.

[0241] Also apparent from FIG. 1 is the relative placement of binding domains participating in a given binding site. For example, the invention comprehends PIMS molecules having two binding domains of a given binding site in either orientation. For example, one PIMS molecule has the orientation N-[optional leader peptide]-[optional hinge region]-constant sub-region-PIMS linker-V_{L}-V_{H}-C and another PIMS molecule has the orientation N-[optional leader peptide]-[optional hinge region]-constant sub-region-PIMS linker-V_{H}-V_{L}-C. Other exemplary PIMS are molecules wherein the C-terminal binding domain is composed of a single variable domain, either V_{H} or V_{L} as well as two variable domains, V_{H}-V_{H} or V_{L}-V_{L} that might have identical, similar or diverse binding properties, such as one V_{H} that binds the CD3 extracellular domain or two V_{H} domains that bind identical or separate epitopes on the CD3 extracellular domain or two V_{H} domains in which one domain binds the CD3 extracellular domain and the other binds, for example, the extracellular domain of CD28. PIMS molecules include polypeptides (and encoding polynucleotides) that contain a constant sub-region derived from an immunoglobulin, a PIMS linker that may be derived from an immunoglobulin, and at least one specific binding domain, wherein the constant sub-region is disposed N-terminal relative to each of the specific binding domains of the molecule.

[0242] PIMS molecules were constructed to take advantage of a pre-existing expression vector cassette strategy that allows swapping of various components contained in a SMIP, Scorpion or PIMS. The strategy and molecular structures are described in U.S. Patent Application No. 60/813,261, particularly in Example 3 therein, and U.S. Ser. No. 60/813,261 is incorporated herein by reference. Using a SMIP cassette, the scFv comprising “Binding Domain 1” (BD1) and the first 400 nucleotides of the Effector Domain, in this case the hinge-C_{H2}-C_{H3} of human IgG1, were removed by completely digesting the vector cassette DNA with the restriction enzymes Agel and BsrGI (New England Biolabs). The largest of the resultant DNA fragments, containing the entire pD18 vector, the human VK3 leader and the C-terminal 300 nucleotides of the human IgG1, was gel-purified and stored at −20° C. for future use.

[0243] To generate PIMS W0001 through PIMS W0007, oligonucleotide primers (W0001F-WO007F) were designed such that they encoded the last 2 amino acids in the VK3 leader, which correspond to the Agel cleavage site (ACCGGT encoding Thr-Gly), a series of intervening amino acids to assure that signal peptide cleavage would not occur within the hinge region of the IgG1 Effector Domain, then the nucleotides containing the recognition sequence for the restriction enzyme XhoI in the correct reading frame. This ensured that the open reading frame was maintained from the leader sequence, through the spacer amino acids and continuing through the entire Effector Domain. These primers were used in a PCR amplification reaction along with a reverse primer, IgBsrG1R, to produce a PCR product that was then digested to completion with both AgeI and BsrGI, gel-purified, and ligated to the previously digested vector described above.

[0244] This design resulted in 7 PIMS molecules that differed only in the amino acids encoded between the leader sequence and the beginning of the Effector Domain (see the amino acid sequences of PIMS W0001-W0007 in the sequence listing). All other sequences in these molecules are identical. These “spacer” amino acids serve not only to limit the leader peptide cleavage during translation, but also as a template from which to guide protein engineering efforts to affect Effector Domain function, protein expression in various biological systems, as well as a point of insertion for other biologically relevant peptides.

[0245] In greater detail, an anti-CD28 PIMS molecule was constructed by initially diluting an aliquot of Scorpion molecule S0033 to a concentration of 5 μg/mL. One μL was used as the template in a PCR containing 20 μmol each from 100 μM stock solutions of primers W0001F and 12HL-XbaR (oligonucleotides used, e.g., as primers, are provided in Table 6) in a total reaction volume of 50 μL in Platinum PCR Supermix High Fidelity PCR mix (Invitrogen). This PCR mixture was then placed in an ABI 9700 Thermal cycler and after an initial 3-minute incubation at 95° C., was cycled 30 times at 94° C. for 30 seconds, 60° C. for 15 seconds and 68° C. for 2 minutes, followed by a final 3-minute extension at 68° C. The reactions were then brought to room temperature, and purified over Qiagen MinElute columns according to the manufacturer's protocol to remove salts, excess primers and enzymes. This purified PCR product was then eluted from the columns in a total volume of 20 μL in 10 mM Tris, pH 8. 4 μL of the PCR product was then mixed with 1 μL of 1 M sodium chloride solution and carefully mixed while adding 1 μL of pCR2.1-TOPO vector mix (Invitrogen) and the reaction mix was incubated on the benchtop for 20 minutes. 2 μL of this reaction was then mixed with 20 μL of chemically competent bacterial strain TOP 10 and incubated on ice 15 minutes, heat-shocked at 42° C. for 30 seconds, brought to 200 μL in SOC broth, and incubated at 37° C. for 30 minutes, all per manufacturer's instructions (Invitrogen). The bacteria were then plated on LB agar+50 μg/mL Kanamycin+X-gal/IPTG Plates (Teknova). The plates were incubated overnight at 37° C. and the next day colonies were inoculated into a deep-well, 96-well plate with 1 mL T-broth+Kanamycin 50 μg/mL (Teknova) per well and shaken overnight at 37° C. The following day, 20 μL was removed from each well and mixed with 20 μL of a 50% glycerol solution in a 96-well plate, which was then stored overnight at −20° C. The remaining bacteria in the deep-well plate were then pelleted at 4K rpm in a Beckman Avanti centrifuge for 10 minutes and the cleared broth was removed, leaving only the bacterial pellets. The plate was then placed on a QiaRobot 8000 and plasmid DNA was purified using the QiaPrep Turbo Kit provided by the manufacturer for use on the QiaRobot 8000. Purified DNA was prepared in this manner for all colonies picked for analysis.

[0246] For PCR sequencing reactions, 5 μL of the purified DNA was taken from each well of the 96-well plate and pipetted into 2 duplicate 96-well plates. A mixture of 4 pmoles DNA sequencing primer M13R (plate 1) or M13F (plate 2) and 4 μL BigDye Terminator Sequencing Mix version 3.1 (ABI) was added to each well for a total volume of 10 μL. These PCR sequencing reactions were then placed in an ABI 9700 Thermal cycler and cycled 25 times at 96° C., 10 seconds, 50° C., 5 seconds and 60° C., 6 minutes. Afterwards, the sequencing reactions were diluted to 20 μL in sterile water and loaded onto pre-spun Centri-Sep G-25 columns (Princeton Separations) to remove unincorporated labeled nucleotides from the reactions. The resultant PCR products were then loaded and run on an ABI 3130-XL DNA Sequencer and the DNA sequences analyzed using the ConTig Express Module of Vector NTI 10.0 (Invitrogen). DNA from one clone containing the desired DNA sequence was then digested with the restriction enzymes Agel and XbaI (both from New England BioLabs) in a 60 μL reaction. Digests were incubated at 37° C. for 6 hours, then loaded onto a 1% agarose TAE gel and run at 110V for 40 minutes. At this point, the 1.5 Kbp W0001 DNA (SEQ ID NO:358) band could be easily resolved from the 4 Kbp vector DNA band. The W0001 DNA was excised from the agarose gel and purified on a Qiagen MinElute column using the manufacturer's instructions for DNA extraction form agarose gels (Qiagen). The resulting digested and purified DNA was eluted in a volume of 10 μL. Two uL of this DNA was used in a ligation reaction including 10 ng pD18+VK3 leader DNA digested with AgeI and XbaI, 1.5 μL of 10× Ligation buffer (Roche) and 1 μL T4 DNA ligase (Roche) in a 15 μL reaction that was incubated overnight at room temperature. After ligation, 5 μL was transformed into chemically competent TOP 10, as described above, with the exception that the cells were plated on 2xYT+carbenicillin (100 μg/mL) plates and incubated overnight at 37° C. Colonies were grown as described above, screened for the presence of a 1.5 Kbp AgeI-XbaI DNA fragment, and again sequenced to confirm that the DNA had the desired nucleotide sequence. A single clone, now identified as W0001, was amplified in a 100 mL T-broth+carbenicillin overnight culture. DNA was prepared from this bacterial culture using a Qiagen Maxi Prep Kit according to the manufacturer's protocol. The resultant DNA preparation was quantified by absorbance at 260 nm using a Nanodrop spectrophotometer.

TABLE 6

| | Sequence |
|---|---|
| Name | Identifier |
| Heavy Chain GSP1 primer | 251 |
| Nested heavy chain GSP2 primer | 252 |
| Light chain GSP1 primer | 253 |
| Nested light chain GSP2 primer | 254 |
| 5′ RACE abridged anchor primer | 255 |
| T7 sequencing primer | 256 |
| M13 reverse primer | 257 |
| PCR primer hVK3L-F3H3 | 258 |
| PCR primer hVK3L-F2 | 259 |
| PCR primer hVK3L-F1-2H7VL | 260 |
| PCR primer2H7VH-NheF | 261 |
| PCR primer G4S-NheR | 262 |
| PCR primer 015VH-XhoR | 263 |
| PCR primer G1H-S-XHO | 265 |
| PCR primer CH3R-EcoR1 | 266 |
| PCR primer G1-XBA-R | 267 |
| PCR primer G4SLinkR1-S | 268 |
| PCR primer G4SLinkR1-AS | 269 |
| PCR primer 2E12VLXbaR | 270 |
| PCR primer 2E12VLR1F | 271 |
| PCR primer 2E12VHR1F | 272 |
| PCR primer 2E12VHXbaR | 273 |
| PCR primer 2e12VHdXbaF1 | 274 |
| PCR primer 2e12VHdXbaR1 | 275 |
| PCR primer IgBsrG1F | 276 |
| PCR primer IgBsrG1R | 277 |
| PCR primer M13R | 278 |
| PCR primer M13F | 279 |
| PCR primer T7 | 280 |
| PCR primer pD18F-17 | 281 |
| PCR primer pD18F-20 | 282 |
| PCR primer pD18F-1 | 283 |
| PCR primer pD18R-s | 284 |
| PCR primer CH3seqF1 | 285 |
| PCR primer CH3seqF2 | 286 |
| PCR primer CH3seqR1 | 287 |
| PCR primer CH3seqR2 | 288 |
| PCR primer L1-11R | 289 |
| PCR primer L1-6R | 290 |
| PCR primer L3R | 291 |
| PCR primer L4R | 292 |
| PCR primer L5R | 293 |
| PCR primer IgBsrG1F | 294 |
| PCR primer L-CPPCPR | 295 |
| CD37 binding domain primer G281LH-NheR | 309 |
| CD37 binding domain primer G281LH-NheF | 310 |
| CD37 binding domain primer G281-LH-LPinF | 311 |
| CD37 binding domain primer G281-LH-HXhoR | 312 |
| CD37 binding domain primer G281-LH-LEcoF | 313 |
| CD37 binding domain primer G281-LH-HXbaR | 314 |
| CD37 binding domain primer G281-HL-HF | 315 |
| CD37 binding domain primer G281-HL-HR3 | 316 |
| CD37 binding domain primer G281-HL-HR2 | 317 |
| CD37 binding domain primer G281-HL-HNheR | 318 |
| CD37 binding domain primer G281-HL-LNheF | 319 |
| CD37 binding domain primer G281-HL-LXhoR | 320 |
| CD37 binding domain primer G281-HL-LXbaR | 321 |
| CD37 binding domain primer G281-HL-EcoF | 322 |
| CD3 binding domain primer (G19-4 temp.) 194-LH-LF1 | 323 |
| CD3 binding domain primer (G19-4 temp.) 194-LF2 | 324 |
| CD3 binding domain primer (G19-4 temp.) 194-LF3 | 325 |
| CD3 binding domain primer (G19-4 temp.) 194-LF4 | 326 |
| CD3 binding domain primer (G19-4 temp.) 194-LF5 | 327 |
| CD3 binding domain primer (G19-4 temp.) 194-LF6 | 328 |
| CD3 binding domain primer (G19-4 temp.) 194-LF7 | 329 |
| CD3 binding domain primer (G19-4 temp.) 194-LR7 | 330 |
| CD3 binding domain primer (G19-4 temp.) 194-LR6 | 331 |
| CD3 binding domain primer (G19-4 temp.) 194-LR5 | 332 |
| CD3 binding domain primer (G19-4 temp.) 194-LR4 | 333 |
| CD3 binding domain primer (G19-4 temp.) 194-LR3 | 334 |
| CD3 binding domain primer (G19-4 temp.) 194-LR2 | 335 |
| CD3 binding domain primer (G19-4 temp.) 194-LH-LR1 | 336 |
| CD3 binding domain primer (G19-4 temp.) 194-LH-HF1 | 337 |
| CD3 binding domain primer (G19-4 temp.) 194-HF2 | 338 |
| CD3 binding domain primer (G19-4 temp.) 194-HF3 | 339 |
| CD3 binding domain primer (G19-4 temp.) 194-HF4 | 340 |
| CD3 binding domain primer (G19-4 temp.) 194-HF5 | 341 |
| CD3 binding domain primer (G19-4 temp.) 194-HF6 | 342 |
| CD3 binding domain primer (G19-4 temp.) 194-HR6 | 343 |
| CD3 binding domain primer (G19-4 temp.) 194-HR5 | 344 |
| CD3 binding domain primer (G19-4 temp.) 194-HR4 | 345 |
| CD3 binding domain primer (G19-4 temp.) 194-HR3 | 346 |
| CD3 binding domain primer (G19-4 temp.) 194-HR2 | 347 |
| CD3 binding domain primer (G19-4 temp.) 194-LH-HR1 | 348 |
| CD3 binding domain primer (G19-4 temp.) 194-HL-HF1 | 349 |
| CD3 binding domain primer (G19-4 temp.) 194-HL-HR1 | 350 |
| CD3 binding domain primer (G19-4 temp.) 194-HL-HR0 | 351 |
| CD3 binding domain primer (G19-4 temp.) 194-HL-LF1 | 352 |
| CD3 binding domain primer (G19-4 temp.) 194-HL-LR3Xho | 353 |
| CD3 binding domain primer (G19-4 temp.) 194-HL-LR3Xba | 354 |
| CD3 binding domain primer (G19-4 temp.) 194-HL-HF1R1 | 355 |
| CD3 binding domain primer (G19-4 temp.) 194-LH-LF1R1 | 356 |
| CD3 binding domain primer (G19-4 temp.) 194-LH-HR1Xba | 357 |
| W0001F PCR primer | 296 |
| W0002F PCR primer | 297 |
| W0003F PCR primer | 298 |
| W0004F PCR primer | 299 |
| W0005F PCR primer | 300 |
| W0006F PCR primer | 301 |
| W0007F PCR primer | 302 |
| W0008F PCR primer | 303 |
| W0009F PCR primer | 304 |
| W0010F PCR primer | 305 |
| W0011F PCR primer | 306 |
| W0012F PCR primer | 307 |
| 12HL-XbaR PCR primer | 308 |

[0247] Additional PIMS molecules have been constructed that conform to the general organization of domains found in the W0001 PIMS, i.e., an N-terminal hinge region joined to a constant subregion Fc effector domain comprising a C_{H2} region and a C_{H3} region, followed by a PIMS linker and a C-terminally disposed binding domain. These PIMS molecules have been designated W0002 to W0009 and the sequences are presented in SEQ ID NOS:360-375. W0002-WO007 each comprises the 2E12 binding domain and specifically binds CD28; W0008 comprises the 2Lm20-4 VHVL 12 binding domain and W0009 comprises the 2Lm20-4 V_{H}V_{L} 17, with each specifically binding CD20. Features of the amino acid sequences of these PIMS, as well as exemplary encoding nucleic acid sequences, are presented in Table 7. Thus, it is apparent that a variety of specific binding domains may be used in PIMS to target the molecule as desired.

TABLE 7

| PIMS Molecule | Features |
|---|---|
| W0001 nucleic acid | Human VK3 leader: nucleotides 1-60 |
| (SEQ ID NO: 358) | Leader-hinge junction: 61-69 |
| | Hinge region: 70-114 |
| | CH2CH3 region: 115-765 |
| | Linker peptide: 766-789 |
| | Binding domain: 790-1551 |
| | Binding region linker: 1153-1212 |
| W0001 polypeptide | Human VK3 leader: amino acids 1-20 |
| (SEQ ID NO: 359) | Leader-hinge junction: 21-23 |
| | Hinge region: 24-38 |
| | CH2CH3 region: 39-255 |
| | Linker peptide: 256-263 |
| | Binding domain: 264-516 |
| | Binding region linker: 385-404 |
| W0002 nucleic acid | Human VK3 leader: nucleotides 1-60 |
| (SEQ ID NO: 360) | Leader-hinge junction: 61-69 |
| | Hinge region: 70-114 |
| | CH2CH3 region: 115-765 |
| | Linker peptide: 766-789 |
| | Binding domain: 790-1551 |
| | Binding region linker: 1153-1212 |
| W0002 polypeptide | Human VK3 leader: amino acids 1-20 |
| (SEQ ID NO: 361) | Leader-hinge junction: 21-23 |
| | Hinge region: 24-38 |
| | CH2CH3 region: 39-255 |
| | Linker peptide: 256-262 |
| | Binding domain: 263-516 |
| | Binding region linker: 385-404 |
| W0003 nucleic acid | Human VK3 leader: nucleotides 1-60 |
| (SEQ ID NO: 362) | Leader-hinge junction: 61-69 |
| | Hinge region: 70-114 |
| | CH2CH3 region: 115-765 |
| | Linker peptide: 766-789 |
| | Binding domain: 790-1551 |
| | Binding region linker: 1153-1212 |
| W0003 polypeptide | Human VK3 leader: amino acids 1-20 |
| (SEQ ID NO: 363) | Leader-hinge junction: 21-23 |
| | Hinge region: 24-38 |
| | CH2CH3 region: 39-255 |
| | Linker peptide: 256-263 |
| | Binding domain: 264-516 |
| | Binding region linker: 385-404 |
| W0004 nucleic acid | Human VK3 leader:: nucleotides 1-60 |
| (SEQ ID NO: 364) | Leader-hinge junction: 61-69 |
| | Hinge region: 70-114 |
| | CH2CH3 region: 115-765 |
| | Linker peptide: 766-789 |
| | Binding domain: 790-1551 |
| | Binding region linker: 1153-1212 |
| W0004 polypeptide | Human VK3 leader: amino acids 1-20 |
| (SEQ ID NO: 365) | Leader-hinge junction: 21-23 |
| | Hinge region: 24-38 |
| | CH2CH3 region: 39-255 |
| | Linker peptide: 256-263 |
| | Binding domain: 264-516 |
| | Binding region linker: 385-404 |
| W0005 nucleic acid | Human VK3 leader:: nucleotides 1-60 |
| (SEQ ID NO: 366) | Leader-hinge junction: 61-69 |
| | Hinge region: 70-114 |
| | CH2CH3 region: 115-765 |
| | Linker peptide: 766-789 |
| | Binding domain: 790-1551 |
| | Binding region linker: 1153-1212 |
| W0005 polypeptide | Human VK3 leader: amino acids 1-20 |
| (SEQ ID NO: 367) | Leader-hinge junction: 21-23 |
| | Hinge region: 24-38 |
| | CH2CH3 region: 39-255 |
| | Linker peptide: 256-263 |
| | Binding domain: 264-516 |
| | Binding region linker: 385-404 |
| W0006 nucleic acid | Human VK3 leader:: nucleotides 1-60 |
| (SEQ ID NO: 368) | Leader-hinge junction: 61-69 |
| | Hinge region: 70-114 |
| | CH2CH3 region: 115-765 |
| | Linker peptide: 766-789 |
| | Binding domain: 790-1551 |
| | Binding region linker: 1153-1212 |
| W0006 polypeptide | Human VK3 leader: amino acids 1-20 |
| (SEQ ID NO: 369) | Leader-hinge junction: 21-23 |
| | Hinge region: 24-38 |
| | CH2CH3 region: 39-255 |
| | Linker peptide: 256-263 |
| | Binding domain: 264-516 |
| | Binding region linker: 385-404 |
| W0007 nucleic acid | Human VK3 leader: nucleotides 1-60 |
| (SEQ ID NO: 370) | Leader-hinge junction: 61-66 |
| | Hinge region: 67-111 |
| | CH2CH3 region: 112-762 |
| | Linker peptide: 763-786 |
| | Binding domain: 787-1548 |
| | Binding region linker: 1150-1209 |
| W0007 polypeptide | Human VK3 leader: amino acids 1-20 |
| (SEQ ID NO: 371) | Leader-hinge junction: 21-22 |
| | Hinge region: 23-37 |
| | CH2CH3 region: 38-254 |
| | Linker peptide: 255-262 |
| | Binding domain: 263-515 |
| | Binding region linker: 384-403 |
| W0008 nucleic acid | Human VK3 leader: nucleotides 1-60 |
| (SEQ ID NO: 372) | Leader-hinge junction: 61-66 |
| | Hinge region: 67-111 |
| | CH2CH3 region: 112-762 |
| | Linker peptide: 763-786 |
| | Binding domain: 787-1503 |
| | Binding region linker: 1150-1185 |
| W0008 polypeptide | Human VK3 leader: amino acids 1-20 |
| (SEQ ID NO: 373) | Leader-hinge junction: 21-22 |
| | Hinge region: 23-37 |
| | CH2CH3 region: 38-254 |
| | Linker peptide: 255-262 |
| | Binding domain: 263-501 |
| | Binding region linker: 384-395 |
| W0009 nucleic acid | Human VK3 leader: nucleotides 1-60 |
| (SEQ ID NO: 374) | Leader-hinge junction: 61-66 |
| | Hinge region: 67-111 |
| | CH2CH3 region: 112-762 |
| | Linker peptide: 763-786 |
| | Binding domain: 787-1518 |
| | Binding region linker: 1150-1200 |
| W0009 polypeptide | Human VK3 leader: amino acids 1-20 |
| (SEQ ID NO: 375) | Leader-hinge junction: 21-22 |
| | Hinge region: 23-37 |
| | CH2CH3 region: 38-254 |
| | Linker peptide: 255-262 |
| | Binding domain: 263-506 |
| | Binding region linker: 384-400 |

[0248] Still other PIMS molecules have been constructed that explore different binding domains, PIMS linker lengths, PIMS linker sources, and the like. The structures of these additional PIMS molecules, including the features identified for some PIMS molecules in Table 7, are provided in the sequence listing. Some of these PIMS molecules exhibit the organization illustrated in Table 8.

TABLE 8

| Name | Binding Domain | PIMS linker |
|---|---|---|
| W0035 | DR | H7 |
| W0036 | DR | H62 |
| W0056 | DR | H65 |
| W0087 | DR | H64 |

[0249] The anti-DR Vk (VL) and Vh (VH) binding regions were constructed by overlapping oligonucleotide PCR. Briefly, 10 pmol of each oligonucleotide (1 ul of 10 uM stock) was added to a PCR reaction and the volume was brought up to 50 ul with PCR SuperMix High Fidelity (Invitrogen cat #10790-020). PCR reactions were conducted according to the following protocol: 94° C. for 2 minutes, then 30 cycles of 94° C. for 30 seconds followed by 50° C. for 20 seconds followed by 68° C. for 3 minutes, and, upon completion of the thirtieth cycle, an incubation at 68° C. for 5 minutes followed by incubation at 4° C. PCR products were cloned into pCR 4-TOPO (Invitrogen cat #45-0030) and sequence verified. Anti-DR Vk (AgeI/BamHI) and anti-DR Vh (BamHI/BclI) fragments were ligated into pD18 scc-p AgeI/BclI digested vector to make the pD18 anti-DR SMIP construct (M0019).

[0250] PIMS were made by adding an EcoRI site to the 5′ end and an XbaI site to the 3′ end during PCR amplification. PCR-amplified fragments with restriction sites useful for cloning at each terminus were cloned into the W0011 construct that had been deleted for the TRU-015 (CD20) binding domain by EcoRI/XbaI digestion. More particularly, W0011 EcoRI/XbaI was used for constructing a PIMS with an H7 PIMS linker (W0035), W0011 H62 EcoRI/XbaI was used for constructing a PIMS with an H62 PIMS linker (WO036), and W0011 H64 was used for constructing a PIMS with an H64 as a PIMS linker (WO087). W0056 was made by using the W0036 DNA construct as a template for oligonucleotide-directed mutagenesis with pD18For, a sequencing primer, as the 5′ oligonucleotide and the following 3′ oligonucleotide: 5′-ttcagaattcggagaatgacgtgctttctg-3′ (SEQ ID NO:549). Subsequently, the fragment was cloned back into W0036 using HindIII/BsrGI restriction sites.

### EXAMPLE 2

### Transfection of PIMS-Encoding Polynucleotide into CHO-S Cells

[0251] One day prior to performing the transfection experiment proper, each of two sterile flasks were seeded with 5×10⁵ cell/ml in 250 ml of Freestyle™ CHO Expression Medium with 8 mM L-glutamine added. The flasks were incubated at 37° C. with 8% CO₂ and rotated at 70 rpm. On the day of transfection, cells in each flask were counted and Freestyle™ medium was added to provide 10⁶ cells/ml. In separate 15 ml sterile tubes, 313 μg Freestyle™ Max Transfection reagent (1.0 μg/ml) was added to 4,687 μl OptiPro™ SFM and 313 μg W0001 DNA plasmid (1.0 μg/ml) was added to 4,687 μl OptiPro SFM™. The diluted Freestyle™ Max Transfection reagent was added to the diluted W0001 plasmid and incubated at room temperature for 10 minutes. The DNA-Freestyle™ Max Reagent complex was then slowly added to the flask containing the cells and the cells were incubated at 37° C., 8% CO₂ on an orbital shaker rotating at 70 rpm. After seven days, the supernatant from each flask was recovered and recombined to a total volume of 500 ml, which was then filtered through a 2 μm filter. The W0001 protein concentration was 7.38 μg/ml as determined by ELISA.

### EXAMPLE 3

### Expression Studies

[0252] Expression studies were performed on the nucleic acids described above that encode specific binding proteins with effector function, or PIMS molecules. Nucleic acids encoding PIMS proteins were transiently transfected into COS cells and the transfected cells were maintained under well known conditions permissive for heterologous gene expression in these cells. DNA was transiently transfected into COS cells using PEI or DEAE-Dextran as previously described (for PEI, see Boussif O. et al., Proc. Natl. Acad. Sci. (USA) 92: 7297-7301, (1995), incorporated herein by reference; Pollard H. et al., J. Biol. Chem. 273:7507-7511, (1998), incorporated herein by reference). Multiple independent transfections of each new molecule were performed in order to determine the average expression level for each new form. For transfection by PEI, COS cells were plated onto 60 mm tissue culture plates in DMEM/10% FBS medium and incubated overnight so that they would be approximately 90% confluent on the day of transfection. Medium was changed to serum-free DMEM containing no antibiotics and incubated for 4 hours. Transfection medium (4 ml/plate) contained serum-free DMEM with 50 μg PEI and 10-20 μg DNA plasmid of interest, such as W0001 plasmid. Transfection medium was mixed by vortexing, incubated at room temperature for 15 minutes, and added to plates after aspirating the existing medium. Cultures were incubated for 3-7 days prior to collection of supernatants. Culture supernatants were assayed for protein expression by SDS-PAGE and Western blotting.

[0253] For SDS-PAGE, samples were prepared either from crude culture supernatants (usually 30 μl/well) or purified protein aliquots, containing 8 μg protein per well, with 2×Tris-Glycine SDS Buffer (Invitrogen) being added to a 1× final concentration. Ten (10) μl SeeBlue Marker (Invitrogen, Carlsbad, Calif.) were run to provide MW size standards. The PIMS proteins were subjected to SDS-PAGE analysis on 4-20% Novex Tris-glycine gels (Invitrogen, San Diego, Calif.). Samples were loaded using Novex Tris-glycine SDS sample buffer (2×) under reducing or non-reducing conditions after heating at 95° C. for 3 minutes, followed by electrophoresis at 175V for 60 minutes. Electrophoresis was performed using 1× Novex Tris-Glycine SDS Running Buffer (Invitrogen).

[0254] The results of expression studies in COS cells showed that PIMS were expressed at levels intermediate between scorpion molecules and SMIP molecules. In particular, a PIMS molecule was expressed at 5-6 μg/ml, a scorpion was expressed at 1-2 μg/ml and a SMIP molecule was expressed at 10 μg/ml.

### EXAMPLE 4

### ELISA Binding Assay

[0255] Comparative ELISA binding assays were performed on a PIMS molecule, a SMIP molecule and a Scorpion molecule. Two capture antibodies were used, i.e., high- and low-affinity anti-CD16 antibodies. To perform the assays, MaxiSorb plates (Costar MaxiSorb black plastic 96-well plates) were each initially coated with 100 μl of 2 μg/ml anti-CD16 low or high affinity antibody (CD16 mIgG high affinity (870 μg/ml): 7.8 μl/3.4 ml PBS; CD16 mIgG low affinity (560 μg/ml): 23.6 μl/6.6 ml PBS). Plates were covered and incubated at 4° C. overnight. The next morning, each plate was washed twice with 200 μl NFDM (PBS/3% non-fat dry milk prepared one day in advance, 3 g/100 ml). Plates were then blocked by adding 200 μl NFDM to each well and incubated for one hour at room temperature. Dilution plates (96-well plastic plates) were made by adding 120 μl NFDM to wells below the highest concentration (C-H for columns 1-7). Subsequently, 120 μl of 8 μg/ml of the protein of interest were added. Proteins of interest (POIs) for CD16 high and low assays: SO129 (an anti-CD20× anti-CD20 multispecific binding protein or scorpion; 1.2 mg/ml) 3.32 μl to 500 μl PBS; 2Lm20-4 (an anti-CD20 SMIP; 1.0 mg/ml—diluted from 54 mg/ml stock), 4 μl to 500 μl PBS; W0001 (an anti-CD28 PIMS; 348 μg/ml) 11.5 μl PBS was then added to a final volume of 500 μl.

[0256] From the mixture in one well, 120 μl was transferred to the next well, and the pattern was continued well-by-well making two-fold serial dilutions. NFDM was then mechanically removed from the MaxiSorb plates (i.e., by flicking). From each well of the dilution plate, 100 μl was transferred to corresponding wells in an ELISA plate. Following transfer, ELISA plates were incubated for one hour at room temperature. During this incubation period, goat anti-human IgG (fcSp) and (H+L)-HRPO conjugates (Caltech code no. H10307, lot no. 14010107, expiration date of January, 2007) were diluted 1:1000 in NFDM (i.e., 10 μl into a final volume of 10 ml NFDM). ELISA plates were then washed three times with PBST (PBS+0.2% Tween20=400 μl Tween 20 to 200 ml PBS) and 100 μl of horseradish peroxidase (HRP) reagent were added to appropriate wells. ELISA plates were then incubated for one hour at room temperature. During this incubation, Pierce Quanta Blue reagent (Pierce Chemicals catalog no. 15169) was prepared by adding 1.1 ml of peroxidase to 8.9 ml of substrate (1:9). ELISA plates were washed three times with PBST and 100 μl of Pierce QuantaBlue mix was added to each well, avoiding bubbles. The wells were then incubated in the dark for 30 minutes at room temperature. A SpectraMAX GeminiXS was then used to measure colorimetric reaction products in plate wells and counts were graphed as mean fluorescence intensity (MFI) as a function of protein concentration. The results are shown in FIG. 2 for high affinity binding and in FIG. 3 for low affinity binding. Both the differences in MFI at the highest protein concentration of a sample source, as well as the differences in how rapidly the signal dropped off with further dilution of the protein sample reflected differences in CD16 binding. The phosphate-buffered saline (PBS) negative control was also plotted to provide the level of background signal in the assay.

### EXAMPLE 5

### Jurkat Cell Binding Assay

[0257] Binding studies were performed to assess the specific binding properties of PIMS molecules, such as the W0001 PIMS. Initially, Jurkat cells were plated using conventional techniques. To the seeded multi-well plates, CD28 purified protein was added, using two-fold titrations across the plate from 20 μg/ml down to 0.16 μg/ml. One well containing no protein served as a background control.

[0258] Seeded plates containing the proteins were incubated on ice for one hour. Subsequently, the wells were washed once with 200 μl 1% FBS in PBS. Goat anti-human antibody (Fc Sp) labeled with FITC at 1:100 was then added to each well, and the plates were again incubated on ice for one hour. The plates were then washed once with 200 μl 1% FBS in PBS and the cells were re-suspended in 200 μl 1% FBS and analyzed by FACS.

[0259] To assess the binding properties of the W0001 anti-CD28 peptide, CD28-expressing Jurkat cells were plated by seeding in individual wells of a culture plate. The CD28 purified protein was then added to individual wells using a two-fold dilution scheme, extending from 20 μg/ml down to 0.16 μg/ml. The W0001 PIMS purified protein was added to individual seeded wells, again using a two-fold dilution scheme, i.e., from 20 μg/ml down to 0.16 μg/ml. One well received no protein to provide a background control. The plates were then incubated on ice for one hour, washed once with 200 μl 1% FBS in PBS, and goat anti-human antibody labeled with FITC (Fc Sp) at 1:100 was added to each well. The plates were again incubated on ice for one hour and subsequently washed once with 200 μl 1% FBS in PBS. Following re-suspension of the cells in 200 μl 1% FBS, FACS analysis was performed. The expressed proteins were shown to bind to CD28 presented on Jurkat cells by flow cytometry (FACS), thereby demonstrating that the W0001 peptide could function to bind the specific target antigen. In addition, the linker used (H1-H6) was not found to significantly affect binding avidity to target antigen.

[0260] Additionally, the ability of anti-CD28 PIMS and SMIP molecules to mediate ADCC-induced cell death of Jurkat cells using peripheral blood mononuclear cells (PBMCs. Briefly, 1×10⁷/ml Jurkat T-cells were labeled with 500 μCi/ml [⁵¹Cr] sodium chromate (#CJS1, Amersham Biosciences, Piscataway, N.J.) for 90 minutes at 37° C. in Iscoves media (#12440-053, Gibco/Invitrogen, Grand Island, N.Y.) with 10% FBS (#16140-071, Gibco/Invitrogen, Grand Island, N.Y.). The ⁵¹Cr-loaded Jurkat cells were then washed 3 times in RPMI (#11875-093, Gibco/Invitrogen, Grand Island, N.Y.) media with 10% FBS and resuspended at 4×10⁵/ml in RPMI. PBMCs from in-house donors were isolated from heparinized whole blood via centrifugation over Lymphocyte Separation Medium (#50494, MP Biomedicals, Aurora, Ohio), washed 2 times with RPMI media and resuspended at 5×10⁶/ml in RPMI with 10% FBS. Reagent samples were added to RPMI media with 10% FBS at 4 times the final concentration and three 10-fold serial dilutions for each reagent were prepared. These reagents were then added to 96-well U-bottom plates at 501/well for the indicated final concentrations. The ⁵¹Cr labeled Jurkat cells were then added to the plates at 50 μl/well (2×10⁴/well). The PBMC were then added to the plates at 1001/well (5×10⁵/well) for a final ratio of 25:1 effectors (PBMC):target (Jurkat cells). Effectors and targets were added to media alone to measure background killing. The ⁵¹Cr labeled Jurkat cells were added to media alone to measure spontaneous release of ⁵¹Cr and to media with 5% NP40 (#28324, Pierce, Rockford, Ill.) to measure maximal release of ⁵¹Cr. The plates were incubated for 5 hours at 37° C. in 5% CO₂. Fifty μl of the supernatant from each well were then transferred to a LumaPlate-96 (#6006633, Perkin Elmer, Boston, Mass) and dried overnight at room temperature. In the morning, radioactive emissions were measured (cpm) using a Packard TopCount-NXT. Percent specific killing was calculated as follows: ((sample−cpm spontaneous release)/(cpm maximal release-cpm spontaneous release))×100. All units were cpm; samples were the mean of quadruplicate samples. Results presented in FIG. 4 show that the PIMS molecule (W0001) induced or mediated Jurkat cell death.

### EXAMPLE 6

### CD3+ Lymphocyte Binding Assay

[0261] A binding study was also performed to assess the specific binding properties of PIMS molecules, such as the W0001 PIMS, to CD3+ lymphocytes. The design of the study involved labeling the CD3+ fraction of a lymphocyte preparation with a phycoerythrin-conjugated murine anti-CD3+ antibody and detecting PIMS, SMIP or background binding to these cells by using a FITC-labeled goat anti-human secondary antibody capable of binding to the constant sub-regions of PIMS and SMIPs.

[0262] In conducting the experiment, peripheral blood mononuclear cells (PBMCs) were obtained from human donors. The PBMCs were isolated from heparinized whole blood via centrifugation over Lymphocyte Separation Media (MP Biomedicals), washed two times with RPMI media (Gibco) and resuspended at 8×10⁶ cells/ml in staining media (PBS w/2.5% mouse sera/2.5% goat sera). Reagent samples (2E12 SMIP, W0001 (a 2E12 PIMS)) were added to staining media at a concentration of two times the final concentration in the assay and a four-fold dilution series was performed. Sixty microliters per well of reagent samples so treated were plated in a 96-well V-bottom plate (Falcon) and media alone was added to the control well. An appropriate volume of the PBMCs was set aside and PE-conjugated anti-CD3 (BD Pharmingen) was added to these cells to equal 10 μl/well of this reagent. The cells stained with PE (phycoerythrin) anti-CD3 antibody were then added, at 60 μl/well, to the wells containing reagent samples (SMIP, PIMS) or media. The cells were incubated for 45 minutes on ice in the dark. The plates were then washed by centrifugation 2.5 times with cold PBS. (The reference to 2.5 washes actually involves 3 washes, i.e., one wash involving the addition of half of the full volume of PBS to the samples before the first centrifugation, followed by two washes each in a full volume of PBS, as would be understood in the art.) A 1:100 dilution of FITC (fluorescein isothiocyanate)-F′2 Goat anti-Human IgG (Caltag) was then added to the wells in 50 μl of staining media. The cells were incubated for 45 minutes on ice in the dark. The cells were then washed 2.5 times in cold PBS, fixed with 1% paraformaldehyde (USB Corp), stored overnight at 4° C., and read the next day on a FACsCalibur Flow Cytometer and analyzed with Cell Quest software (Becton Dickinson). The results provided in FIG. 5 establish that the mean fluorescence intensity associated with CD3+ lymphocytes increases with increasing concentration of either W0001 (a 2E12 PIMS) or 2E12 SMIP. Thus, the fluorescence intensity is not an artifactual reading and reflects binding of the 2E12 PIMS to CD3+ lymphocytes, further confirming the functional utility of the PIMS protein structure.

### EXAMPLE 7

### Binding Competition

[0263] A binding study was conducted to measure the capacity of anti-CD37 PIMS to compete with TRU-016, an anti-CD37 SMIP, for binding to B-cells. Ten mL of RAMOS cells were resuspended in TSA/FBS (1×TSA-50 mM Tris HCl pH 7.8, 0.9% NaCl with 0.5% FBS) to a concentration of 2×10⁶ cells/mL. 100 μl of this cell suspension was added into individual wells of a 96-well, U-bottom plate resulting in 200,000 cells/well. The plate was centrifuged to pellet the cells and the TSA/FBS was removed. Dilutions of competitor proteins were performed beforehand in a dilution plate. The starting concentration of competitor proteins was 1.0 μM and the proteins were serially diluted three-fold. 100 ul of the diluted competitor proteins were added to the wells of the U-bottom plate. 100 uL of 12 nM TRU-016-Eu (Europium-labeled TRU-016) was added to the 100 uL of competitor proteins and cells into each well giving a final concentration of 6 nM TRU-016-Eu in each well. Proteins and cells were incubated at 4° C. for 30 minutes. The treated cells were washed three times with 200 μL TSA/FBS. Cells were resuspended in 200 μL Enhancement solution, transferred to a yellow 96-well plate, shaken for 5 minutes, and then read on an EnVision™ plate reader (PerkinElmer, Waltham, Mass.). The results are shown in FIG. 9. The results showed a displacement of TRU-016-Eu as the concentration of any of the various PIMS molecules increased, regardless of PIMS linker length (10- to 25-amino-acid lengths were examined) and regardless of the type of PIMS linker (H7 or H65). The data establish that a variety of PIMS linkers are functional, as evidenced by the variety of PIMS binding to CD37, with PIMS containing PIMS linkers based on the H65 structure binding better than PIMS containing PIMS linkers based on the H7 linker derived from an immunoglobulin hinge region.

### EXAMPLE 8

### Additional Binding Studies of PIMS

### A. Binding of Anti-CD20 PIMS to Wil2-S Cells

[0264] For the Wil2-S B-cell binding study, 100 ug/ml of PIMS was used. In brief, 5×10⁵ Wil2-S B-cells per well were incubated on ice with each of the molecules (e.g., PIMS or SMIP), as indicated in FIG. 6, in FACS buffer (1×PBS, 1% Fetal Bovine Serum, 0.02% sodium azide). Binding was detected using a goat anti-human IgG (gamma specific) conjugated to phycoerythrin (PE) (Jackson Immunoresearch # 109-116-098) at 1:100 dilution in FACS buffer. Results were analyzed by one-color flow cytometry on a FACsCalibur using CellQuest software. In addition to assessing the binding of anti-CD20 PIMS to WIL2-S cells, the binding of anti-CD20 SMIPs to Wil2-S cells expressing CD20 on their surface was also assessed. As noted above, detection of binding was achieved with a fluorescent-labeled secondary antibody that recognizes the Fc portion of SMIPs or PIMS molecules, and results in a fluorescent signal (represented as geoMean), as shown in FIG. 6. In that Figure, 2Lm20-4-scc is an LH SMIP also known as DNE076, 2Lm20-4HL17 is an HL SMIP with a 17-amino-acid gly4ser linker and is also known as DNE079, 2Lm20-4HL12 is an HL SMIP with a 12-amino-acid gly4ser linker and is also known as DNE078, PIMS20-17 is also known as WO009, and PIMS20-12 is also known as W0008.

[0265] The results shown in FIG. 6 reveal that higher concentrations of protein exhibited increased signal, representing greater binding that can reach saturation binding (plateau of signal). Both the level of signal achieved and the slope of the graph of signal as a function of protein concentration are indications of binding strength and affinity. These data show that, at lower concentrations, the CD20-directed PIMS bind less well compared to most of the CD20-directed SMIPs; however, at higher concentrations, the signal for PIMS exceeds that from SMIPs. Saturation may be about 2-fold higher for the PIMS molecules compared to the SMIPs with the same CD20 binding domain (2Lm20-4) and configuration (VHVL). In addition, while the gly4ser linker length (12 or 17) affected binding of the HL SMIPs (black circle/triangle), both linker versions of PIMS showed similar binding patterns (open triangle/diamond).

### B. Binding of Anti-DR PIMS to Wil2-S Cells

[0266] A binding study was also conducted to assess the capacity of anti-DR PIMS molecules to bind to Wil2-S B-cells. The binding assay described above was used with appropriate substitutions of proteins of interest. In brief, 500,000 Wil2-S cells were placed in each well of a multi-well plate and were incubated on ice with one of the PIMS or SMIPs under investigation in FACS buffer (1×PBS, 1% FBS, 0.02% sodium azide). Detection of phycoerythrin was achieved following exposure of cells to 1:100 dilution of PE-conjugated goat anti-human IgG (gamma specific) secondary antibody (Jackson Immunoresearch #109-116-098) in FACS buffer. The results, presented in FIG. 7, show that the binding of anti-DR PIMS molecules is strongly dependent on the PIMS linkers. W0035, the anti-DR PIMS with the H7 linker, has the lowest binding activity. W0036, another anti-DR PIMS with the H62 linker, binds better than W0035. W0056, containing the H65 linker, exhibited the best binding activity, comparable to the parental anti-DR SMIP (M0019).

### C. Binding of Anti-CD37 PIMS and Anti-CD19 PIMS to Ramos Cells

[0267] Another binding study assessed the capacities of mouse anti-CD37 PIMS and anti-CD19 PIMS to bind to Ramos B-cells. The assay was performed as generally described above and in Example 5, and the results are presented in FIG. 9. The proteins under investigation in this experiment were aHer2 (anti-Her2). See Example 12 for disclosure relating to Her2), TRU-016 (an anti-CD37 SMIP), W0028 (a mouse anti-CD37 PIMS), WO029 (a hemi-humanized anti-CD19 SMIP), W0030 (a mouse anti-CD19 PIMS, and W0031 (a different mouse anti-CD19 PIMS). For each protein, 3:1 serial dilutions were prepared spanning the range of 16.7 ug to 0.01 ug. The results in FIG. 9 show tha the TRU-016 SMIP and W0028 bind in significantly greater quantity than the other PIMS or aHer2 as the concentration of the protein increases from 0.01 ug/ml, but FIG. 9 also establishes that the various PIMS proteins being tested bound to their targets.

### D. Binding of Anti-CD28 PIMS to Jurkat T-Cells

[0268] The binding of anti-CD28 PIMS to Jurkat T-cells was also investigated. A variety of anti-CD28 PIMS proteins were analyzed, i.e., W0001 (an anti-CD28 PIMS with the H7 PIMS linker), W0050 (an anti-CD28 PIMS with the H9 PIMS linker), W0051 (an anti-CD28 PIMS with the H47 PIMS linker), W0052 (an anti-CD28 PIMS with the H56 PIMS linker), W0053 (an anti-CD28 PIMS with the H62 PIMS linker), WO083 (an anti-CD28 PIMS with the H65 PIMS linker), and an anti-CD28 SMIP. To conduct this binding study, for each of the above-mentioned proteins, 50 ul of protein solution at varying concentrations from 10 ug/ml to 5 ng/ml were individually added to wells of a V-shaped 96-well plate. Next, 2.5×10⁵ Jurkat cells in 50 ul were added to each well. Samples were then incubated on ice for 30 minutes, washed 2 times with 1% BSA in PBS and a 1:200 dilution of anti-human IgG-PE in 1% BSA in PBS was added. The plate was incubated on ice for an additional 30 minutes and washed once with 1% BSA in PBS. Cells were resuspended in 2% formaldehyde in PBS. The mean fluorescence intensity of binding in each well was measured using a Facscan.

[0269] The results of the binding study involving anti-CD28 PIMS and Jurkat T-cells are shown in FIG. 10. All of the anti-CD28 PIMS, regardless of the particular PIMS linker, exhibited comparable binding activity. PIMS linkers did not appeared to influence anti-CD28 PIMS binding to Jurkat cells. This is unlike the case of anti-DR PIMS binding, where binding is strongly influenced by the type of scorpion linker being used.

### E. Binding of PIMS Constant Sub-Regions to CD16

[0270] A binding study of the constant sub-region of PIMS molecules was also conducted using CD16, identified as F_{C} receptors F_{C}γRIIIa and F_{C}γRIIIb. CD16 binds to the F_{C} region of IgG antibodies. To assess the binding properties of PIMS to CD16, a low-affinity CD16 was employed. To conduct the assay, Ramos cells were added to cell culture wells at 350,000 cells/well. Solutions of the proteins of interest, including TRU-016 (an anti-CD37 SMIP) and anti-CD37 PIMS molecules were added at concentrations ranging from 0.011 ug/well to 1.2 ug/well; CD16 was added to 1 ug/well. Reaction mixtures were then washed 2.5× with 200 ul FACS buffer (1×PBS, 1% FBS, 0.02% sodium azide). Goat anti-mouse conjugated to phycoerythrin (PE) at 1:100 dilution (Jackson Immunoresearch # 115-116-071) was then added and the mixture was incubated on ice for 45 minutes. Subsequently, the reaction mixtures were washed 1.5× with FACS buffer and subjected to analysis. The CD16lo (low affinity CD16) binding data is presented in Table 9.

TABLE 9
Geo
MFI

| Sample | | | | | | | | | |
|---|---|---|---|---|---|---|---|---|---|
| conc (ug/ml) | TRU016 | W0012 | W0023 | W0024 | W0025 | W0094 | W0095 | W0096 | W0097 |
| 24 | 157.72 | 119.99 | 75.33 | 145.82 | 124.11 | 77.19 | 85.82 | 65.36 | 64.89 |
| 8 | 227.94 | 69.76 | 41.97 | 102.88 | 81.76 | 105.02 | 89.6 | 99.77 | 96.44 |
| 2.67 | 228.76 | 30.74 | 17.71 | 44.38 | 32.29 | 98.89 | 59.99 | 93.57 | 97.8 |
| 0.89 | 214.19 | 11.73 | 6.67 | 16.38 | 10.27 | 52.42 | 24.32 | 43.65 | 54.55 |
| 0.3 | 143.31 | 4.25 | 2.86 | 5.17 | 3 | 16.69 | 5.1 | 11.53 | 20.39 |
| 0.1 | 57.46 | 2.25 | 1.7 | 2.03 | 1.61 | 3.88 | 1.64 | 2.71 | 6.12 |
| 0.033 | 21.75 | 1.59 | 1.45 | 1.49 | 1.31 | 1.57 | 1.36 | 1.46 | 2.02 |
| 0.011 | 7.41 | 1.34 | 1.38 | 1.33 | 1.42 | 1.28 | 1.19 | 1.25 | 1.61 |

[0271] A graphic illustration of the results of the binding study involving CD16lo binding to anti-CD37 PIMS molecules and controls is presented in FIG. 11.

[0272] All of the anti-CD37 PIMS subjected to analysis, which included PIMS with a wide variety of PIMS linkers, showed lower CD16 binding compared to TRU-016 (anti-CD37 SMIP). These findings are consistent with the ADCC assay results described in Example 9 below.

### EXAMPLE 9

### ADCC Activity of PIMS

[0273] To assess the antibody-dependent cellular cytotoxicity (ADCC) inducible by, or mediated by, PIMS, ADCC assays were conducted. Briefly, 1×10⁷ cells/ml BJAB B-cells were labeled with 500 uCi/ml ⁵¹Cr sodium chromate (#CJS1, Amersham Biosciences, Piscataway, N.J.) for 2 hours at 37° C. in Iscoves media (#12440-053, Gibco/Invitrogen, Grand Island, N.Y.) with 10% FBS (#16140-071, Gibco/Invitrogen, Grand Island, N.Y.). The ⁵¹Cr-loaded BJAB B-cells were then washed 3 times in RPMI (#11875-093, Gibco/Invitrogen, Grand Island, N.Y.) media with 10% FBS and resuspended at 4×10⁵ cells/ml in RPMI. Peripheral blood mononuclear cells (PBMC) from in-house donors were isolated from heparinized whole blood via centrifugation over Lymphocyte Separation Medium (#50494, MP Biomedicals, Aurora, Ohio), washed 2 times with RPMI media and resuspended at 5×10⁶ cells/ml in RPMI with 10% FBS. Reagent samples were added to RPMI media with 10% FBS at 4 times the final concentration and three 10-fold serial dilutions for each reagent were prepared. These reagents were then added to 96-well U-bottom plates at 50 ul/well to achieve the indicated final concentrations. The ⁵¹Cr-labeled BJAB cells were then added to the plates at 50 ul/well (2×10⁴ cells/well).

[0274] The PBMC were then added to the plates at 100 ul/well (5×10⁵ cells/well) for a final ratio of 25:1 effectors (PBMC):target (BJAB). Effectors and targets were added to media alone to measure background killing. The ⁵¹Cr-labeled BJAB B-cells were added to media alone to measure spontaneous release of ⁵¹Cr and to media with 5% NP40 (#28324, Pierce, Rockford, Ill.) to measure maximal release of ⁵¹Cr. The plates were incubated for 6 hours at 37° C. in 5% CO₂. Fifty ul of the supernatant from each well were then transferred to a LumaPlate-96 (#6006633, Perkin Elmer, Boston, Mass) and dried overnight at room temperature. In the morning, cpm were read on a Packard TopCount-NXT. Percent specific killing was calculated according to the following equation: ((cpm of sample (mean of quadruplicate set of samples)−cpm spontaneous release)/(cpm maximal release-cpm spontaneous release))×100. Results are shown in FIG. 12, which reveals a general increase from about 40% to about 58% in the percentage of specifically killed BJAB B-cells as protein concentration is increased from 0.01 ug/ml to 10 ug/ml for each of the tested proteins, i.e., 2Lm20-4 (a humanized anti-CD20 SMIP), W0008 (an anti-CD20 PIMS with a 10-amino-acid PIMS linker), and W0009 (an anti-CD20 PIMS with a 15-amino-acid PIMS linker). As expected, the media control showed little cell killing.

[0275] The capacity of anti-CD28 PIMS molecules to induce ADCC-mediated killing of Jurkat T-cells was assessed in an ADCC assay as described above. The results are shown in FIG. 13, which revealed that W001, an anti-CD28 PIMS, induced a greater percentage of specific killing of Jurkat T-cells as the concentration of that protein increased than was found with either of two anti-CD28 SMIP molecules (2E121g or a variant thereof in the form of 2E12 N297D Ig) or with media alone.

[0276] An analogous ADCC assay was conducted to determine the capacity of anti-DR PIMS to induce ADCC of BJAB B-cells. The assay was again conducted as described above, and the results are shown in FIG. 14. Rituximab showed the highest percentage of specific cell killing at all tested concentrations, and the percentage of specifically killed cells increased with increasing concentrations of the protein. Similarly, M0019, an anti-DR SMIP (with an H7 linker region) showed a high level of specific cell killing and the percentage of killed cells increased with each increase in protein concentration. The anti-DR PIMS also showed specific cell killing, with the percentage of killed cells increasing as the percentage of PIMS protein increased from 0.2 nM to 20 nM. W0056, an anti-DR PIMS (containing an H65 PIMS linker) exhibited the highest level of specific cell killing of any anti-DR PIMS at all tested concentrations. W0036 (anti-DR PIMS with an H62 PIMS linker), like W0056, showed a decrease in percentage of specific cell killing as the relevant PIMS concentration was increased from 20 to 200 nM. In contrast, W0035 (anti-DR PIMS with an H7 PIMS linker) exhibited a dramatic increase in percentage of specifically killed cells as the PIMS concentration increased from 0.2 to 20 nM and then the percent of killed cells roughly plateaued as the concentration was increased beyond 20 nM to 200 nM. The results demonstrate that anti-DR PIMS can induce 42-58% ADCC-mediated cell death of BJAB B-cells at a PIMS concentration of 20 nM, with the higher end of the range attributable to PIMS with the H65 PIMS linker and the lower end of the range attributable to PIMS with the H7 PIMS linker.

[0277] An ADCC assay as described above was also performed to assess the capacity of anti-CD37 PIMS to induce the ADCC-mediated cell death of BJAB B-cells. In this assay, two PIMS (W0012 and W0094) were compared with TRU-016 (an anti-CD37 SMIP). W0012 is an anti-CD37 PIMS with an H7 PIMS linker. W0094 is an anti-CD37 PIMS with an H65 PIMS linker. Also assessed in this assay were rituximab as a positive control and media alone as a negative control. The results showed that both PIMS had lower ADCC activity than the SMIP, as shown in FIG. 15. Although the binding studies disclosed herein showed that W0094 bound better than W0012, W0094 does not exhibit greater ADCC inducing capacity than W0012, unlike the results disclosed above for anti-DR PIMS, where anti-DR PIMS with the H65 PIMS linker showed consistently greater ADCC activity than anti-DR PIMS with the H7 PIMS linker.

### EXAMPLE 10

### CDC Activity of PIMS

[0278] Complement-dependent cytotoxicity (CDC) provides another mechanism by which eukaryotic (e.g., mammalian) cells such as B-cells are killed. The CDC activity of PIMS was explored to determine whether these single-chain molecules exhibiting specific target binding could also induce, or mediate, CDC of target cells, such as B-cells expressing a PIMS binding partner on their surface. To assess CDC activity, 5 to 2.5×10⁵ Ramos B-cells were added per well to 96-well V-bottomed plates in 50 ul of Iscoves (#12440-053, Gibco/Invitrogen, Grand Island, N.Y.) media (no FBS). The proteins subjected to the assay were 2Lm20-4 (a humanized anti-CD20 SMIP), TRU-015 (an anti-CD20 SMIP), W0008 (a PIMS having a binding domain in HL orientation with a 10-amino-acid PIMS linker), W0009 (a PIMS having a binding domain in HL orientation with a 15-amino-acid PIMS linker) and, as a negative control, media alone. Separately, each of these proteins in Iscoves, (or Iscoves alone) was added to the wells in 50 ul at 2 times the indicated final concentration. The cells and reagents were incubated for 45 minutes at 37° C. The cells were washed 2½ times in Iscoves media with no FBS and resuspended in Iscoves with human serum (# A113, Quidel, San Diego, Calif.) in the 96-well plate at the indicated concentrations. The cells were then incubated for 90 minutes at 37° C. The cells were washed by centrifugation and resuspended in 125 ul cold PBS. The cells were transferred to FACs cluster tubes (#4410, CoStar, Corning, N.Y.) and 125 ul PBS with propidium iodide (# P-16063, Molecular Probes, Eugene, Oreg.) at 5 ug/ml was added. The cells were incubated with propidium iodide for 15 minutes at room temperature in the dark and then placed on ice and read and analyzed on a FACsCalibur with CellQuest software (Becton Dickinson).

[0279] The results are shown in FIG. 16. Apparent from the Figure, as the concentration of protein increased, the CDC activity of each of the two SMIPs increased from about 5% PI-positive cells at 0.2 ug/ml protein to about 88% PI-positive cells at 20 ug/ml. The two PIMS molecules also showed about 5% PI-positive cells at 0.2 ug/ml, but rose to about 69% PI-positive cells at 20 ug/ml. The percentage of PI-positive cells, a measure of the level of CDC activity induced, remained virtually identical for the two PIMS molecules at all tested concentrations, indicating that PIMS linkers of 10-15 amino acids function similarly with respect to CDC induction.

### EXAMPLE 11

### Cell Growth Inhibition by PIMS

[0280] The preceding examples established that PIMS molecules are useful in inducing cell death by ADCC and/or CDC. In addition, PIMS molecules are useful in inhibiting the growth of eukaryotic cells. To establish this property of PIMS molecules, four-fold dilutions of various PIMS proteins, SMIP proteins, and other controls were prepared in RPMI 1640 (Gibco Invitrogen #11875, Grand Island, N.Y.) with 10% FCS (Gibco/Invitrogen #01-40200J, Grand Island, N.Y.) to a concentration of four times the final concentration shown in FIG. 17. SU-DHL-6 B-cells (DMSZ # ACC 572, Braunschweig, Germany) were suspended in the RPMI with 10% FCS to a concentration of 2×10⁵ cells/ml. Black 96-well flat-bottom plates were used for the assay and media was added to wells where necessary to result in a final well volume of 200 microliters. Cells were then added at 50 microliters/well (10⁴ cells/well). The proteins of interest were then separately added to the wells at 50 microliters/well. Cross-linking solutions of Fab′2 Goat anti-Mouse IgG (GAM; Jackson Immunoresearch Labs #115-006-062, West Grove, Pa.) or Fab′2 Goat anti-Human IgG (GAH; Jackson Immunoresearch Labs #109-006-008, West Grove, Pa.) in media were prepared. Four-fold dilutions were prepared to yield a final concentration of cross-linker at three times the concentration of the proteins of interest. These proteins were then separately added to the wells with the goat anti-human secondary antibody added to the wells with PIMs and SMIP and the goat anti-mouse secondary antibody was added to the wells with the monoclonal antibody (see FIG. 17). Plates were incubated for 72 hours at 37° C. in 5% CO₂.

[0281] The impact of the various proteins of interest on ATP release was measured by ATPlite (Perkin Elmer # 6016943, Waltham, Mass.). These cytotoxicity studies were performed as recommended by the manufacturer utilizing a substrate solution that emits light in a manner proportional to the ATP present in each sample. Briefly, mammalian cell lysis buffer was added to lyse the cells, followed by addition of the substrate solution. The amount of light produced in each well was measured in a TopCountR Microplate Scintillation and Luminescence Counter (Perkin Elmer, Waltham, Mass.). The results shown in FIG. 17 are represented as the mean and standard deviation of quadruplicate samples. The results demonstrate that, as PIMS (or SMIP) concentration is increased from 0.03 ug/ml to 0.5 ug/ml, growth inhibition of DHL-6 B-cells dramatically increases relative to the more modest growth inhibition seen with the monoclonal antibodies tested at the same protein concentrations. Thus, PIMS exhibit the capacity to inhibit cell growth.

### EXAMPLE 12

### Anti-Her2 PIMS

[0282] Her2 (also known as neu, ErbB-2, and ERBB2) is a protein associated with aggressive breast cancers. The protein is a member of the ErbB protein family, or the epidermal growth factor receptor family. It is a cell membrane surface-bound receptor tyrosine kinase that is normally involved in the signal transduction pathways leading to cell growth and differentiation, and it has been identified as a target for anti-cancer treatments, such as treatments for breast cancer, ovarian cancer, stomach cancer, and others. A PIMS molecule specifically recognizing Her2 would be expected to target the ADCC, CDC and growth inhibitory properties of PIMS to cells expressing Her2 at high levels, i.e., to cancer cells.

[0283] To assess the capacity of PIMS to recognize Her2, a binding assay was performed using the protocol described in Examples 5 and 6, with appropriate substitution of anti-Her2 PIMS and SKBR3 breast cancer cells expressing Her2. The results are shown in FIG. 18, which shows that Her033smip (i.e., an anti-Her2 SMIP) exhibited a dramatic increase in mean fluorescence intensity as the protein concentration was increased from 0.0046 ug/ml to 10.0000 ug/ml. Less dramatic, but still significant, increases in mean fluorescence intensity as protein concentration increased were seen with W042, W044 and W045, three anti-Her2 PIMS molecules. The W041 PIMS did not appear to bind to Her2 on SKBR3 cells. The data establish that anti-Her2 PIMS molecules do bind Her2 on the surface of SKBR3 cells.

[0284] The results obtained with SKBR3 cells were also found when Her2 PIMS were exposed to another breast cancer cell line, the MDA-MB453 cell line. With appropriate substitutions of proteins of interest and cells, the protocol described above and in Examples 5 and 6 was followed. Results are presented in FIG. 19, which shows the mean fluorescent intensity for Her033, the anti-Her2 SMIP, rose rapidly with increasing protein concentration and then plateaued between 2.222 and 20.000 ug/ml. The W0042 and W0057 PIMS molecules also showed significance increase in binding to MDA-MB453 cells, as revealed by the marked increase in mean fluorescent intensity with increasing protein concentration. No plateau was seen for PIMS binding. As expected, the control exhibited negligible binding as shown by the minimal mean fluorescent intensity observed through all tested concentrations.

[0285] The binding of Her2 displayed on multiple breast cancer cell lines by PIMS molecules indicates that PIMS will be useful in cancer diagnosis, prognosis and treatment, including but not limited to cancers associated with Her2 expression or over-expression, such as breast, ovarian and stomach cancers. More generally, PIMS that target a cancer marker are expected to be useful diagnostic, prognostic and therapeutic agents.

[0286] Variations on the structural themes for specific binding proteins with effector function will be apparent to those of skill in the art upon review of the present disclosure, and such variant structures are within the scope of the invention.

The application's sequence listing, which the Patent Office published only in electronic form, follows.

SEQUENCE LISTING (550 sequences)

SEQ ID NO: 1 - DNA, 2337 bp, Artificial sequence
  Synthetic polynucleotide
  misc_feature: 2H7sssIgG1-STD1-2e12HL (w/2E12 leader) (PN) CH2CH3
aagcttgccgccatggattttcaagtgcagattttcagcttcctgctaatcagtgcttcagtcataatgtccagaggacaaattgttctctcccagtctccagcaatcctgtctgcatctccaggggagaaggtcacaatgacttgcagggccagctcaagtgtaagttacatgcactggtaccagcagaagccaggatcctcccccaaaccctggatttatgccccatccaacctggcttctggagtccctgctcgcttcagtggcagtgggtctgggacctcttactctctcacaatcagcagagtggaggctgaagatgctgccacttattactgccagcagtggagttttaacccacccacgttcggtgctgggaccaagctggagctgaaagatggcggtggctcgggcggtggtggatctggaggaggtgggagctctcaggcttatctacagcagtctggggctgagtcggtgaggcctggggcctcagtgaagatgtcctgcaaggcttctggctacacatttaccagttacaatatgcactgggtaaagcagacacctagacagggcctggaatggattggagctatttatccaggaaatggtgatacttcctacaatcagaagttcaagggcaaggccacactgactgtagacaaatcctccagcacagcctacatgcagctcagcagcctgacatctgaagactctgcggtctatttctgtgcaagagtggtgtactatagtaactcttactggtacttcgatgtctggggcacagggaccacggtcaccgtctctgatcaggagcccaaatcttctgacaaaactcacacatccccaccgagctcagcacctgaactcctggggggaccgtcagtcttcctcttccccccaaaacccaaggacaccctcatgatctcccggacccctgaggtcacatgcgtggtggtggacgtgagccacgaagaccctgaggtcaagttcaactggtacgtggacggcgtggaggtgcataatgccaagacaaagccgcgggaggagcagtacaacagcacgtaccgtgtggtcagcgtcctcaccgtcctgcaccaggactggctgaatggcaaggagtacaagtgcaaggtctccaacaaagccctcccagcccccatcgagaaaacaatctccaaagccaaagggcagccccgagaaccacaggtgtacaccctgcccccatcccgggatgagctgaccaagaaccaggtcagcctgacctgcctggtcaaaggcttctatcccagcgacatcgccgtggagtgggagagcaatgggcagccggagaacaactacaagaccacgcctcccgtgctggactccgacggctccttcttcctctacagcaagctcaccgtggacaagagcaggtggcagcaggggaacgtcttctcatgctccgtgatgcatgaggctctgcacaaccactacacgcagaagagcctctccctgtctccgggtaagaattatggtggcggtggctcgggcggtggtggatctggaggaggtgggagtgggaattctcaggtgcagctgaaggagtcaggacctggcctggtggcgccctcacagagcctgtccatcacatgcaccgtctcagggttctcattaaccggctatggtgtaaactgggttcgccagcctccaggaaagggtctggagtggctgggaatgatatggggtgatggaagcacagactataattcagctctcaaatccagactatcgatcaccaaggacaactccaagagccaagttttcttaaaaatgaacagtctgcaaactgatgacacagccagatactactgtgctcgagatggttatagtaactttcattactatgttatggactactggggtcaaggaacctcagtcaccgtctcctctgggggtggaggctctggtggcggtggatccggcggaggtgggtcgggtggcggcggatctgacattgtgctcacccaatctccagcttctttggctgtgtctctaggtcagagagccaccatctcctgcagagccagtgaaagtgttgaatattatgtcacaagtttaatgcagtggtaccaacagaaaccaggacagccacccaaactcctcatctctgctgctagcaacgtagaatctggggtccctgccaggtttagtggcagtgggtctgggacagactttagcctcaacatccatcctgtggaggaggatgatattgcaatgtatttctgtcagcaaagtaggaaggttccatggacgttcggtggaggcaccaagctggaaatcaaacgttaatctaga

SEQ ID NO: 2 - protein, 772 aa, Artificial sequence
  Synthetic polypeptide
  misc_feature: 2H7sssIgG1-STD1-2e12HL (w/2E12 leader) (AA) CH2CH3
  misc_feature (1)..(22): Leader
  misc_feature (23)..(128): VL
  misc_feature (129)..(144): Linker
  misc_feature (145)..(265): VH
  misc_feature (268)..(281): Hinge
  misc_feature (500)..(519): EFD-BD2 linker
  misc_feature (520)..(640): VH2
  misc_feature (641)..(660): Linker2
MDFQVQIFSFLLISASVIMSRGQIVLSQSPAILSASPGEKVTMTCRASSSVSYMHWYQQKPGSSPKPWIYAPSNLASGVPARFSGSGSGTSYSLTISRVEAEDAATYYCQQWSFNPPTFGAGTKLELKDGGGSGGGGSGGGGSSQAYLQQSGAESVRPGASVKMSCKASGYTFTSYNMHWVKQTPRQGLEWIGAIYPGNGDTSYNQKFKGKATLTVDKSSSTAYMQLSSLTSEDSAVYFCARVVYYSNSYWYFDVWGTGTTVTVSDQEPKSSDKTHTSPPSSAPELLGGPSVFLFPPKPKDTLMISRTPEVTCVVVDVSHEDPEVKFNWYVDGVEVHNAKTKPREEQYNSTYRVVSVLTVLHQDWLNGKEYKCKVSNKALPAPIEKTISKAKGQPREPQVYTLPPSRDELTKNQVSLTCLVKGFYPSDIAVEWESNGQPENNYKTTPPVLDSDGSFFLYSKLTVDKSRWQQGNVFSCSVMHEALHNHYTQKSLSLSPGKNYGGGGSGGGGSGGGGSGNSQVQLKESGPGLVAPSQSLSITCTVSGFSLTGYGVNWVRQPPGKGLEWLGMIWGDGSTDYNSALKSRLSITKDNSKSQVFLKMNSLQTDDTARYYCARDGYSNFHYYVMDYWGQGTSVTVSSGGGGSGGGGSGGGGSGGGGSDIVLTQSPASLAVSLGQRATISCRASESVEYYVTSLMQWYQQKPGQPPKLLISAASNVESGVPARFSGSGSGTDFSLNIHPVEEDDIAMYFCQQSRKVPWTFGGGTKLEIKR

SEQ ID NO: 3 - protein, 772 aa, Artificial sequence
  Synthetic polypeptide
  misc_feature: 2H7sssIgG1(P238S/P331S)-STD1-2e12HL (w/2e12 leader) (AA) CH2CH3
  misc_feature (1)..(22): Leader
  misc_feature (23)..(128): VL
  misc_feature (129)..(144): Linker
  misc_feature (145)..(265): VH
  misc_feature (268)..(281): Hinge
  misc_feature (500)..(519): EFD-BD2 linker
  misc_feature (520)..(640): VH2
  misc_feature (641)..(660): Linker2
  misc_feature (661)..(772): VL2
MDFQVQIFSFLLISASVIMSRGQIVLSQSPAILSASPGEKVTMTCRASSSVSYMHWYQQKPGSSPKPWIYAPSNLASGVPARFSGSGSGTSYSLTISRVEAEDAATYYCQQWSFNPPTFGAGTKLELKDGGGSGGGGSGGGGSSQAYLQQSGAESVRPGASVKMSCKASGYTFTSYNMHWVKQTPRQGLEWIGAIYPGNGDTSYNQKFKGKATLTVDKSSSTAYMQLSSLTSEDSAVYFCARVVYYSNSYWYFDVWGTGTTVTVSDQEPKSSDKTHTSPPSSAPELLGGSSVFLFPPKPKDTLMISRTPEVTCVVVDVSHEDPEVKFNWYVDGVEVHNAKTKPREEQYNSTYRVVSVLTVLHQDWLNGKEYKCKVSNKALPASIEKTISKAKGQPREPQVYTLPPSRDELTKNQVSLTCLVKGFYPSDIAVEWESNGQPENNYKTTPPVLDSDGSFFLYSKLTVDKSRWQQGNVFSCSVMHEALHNHYTQKSLSLSPGKNYGGGGSGGGGSGGGGSGNSQVQLKESGPGLVAPSQSLSITCTVSGFSLTGYGVNWVRQPPGKGLEWLGMIWGDGSTDYNSALKSRLSITKDNSKSQVFLKMNSLQTDDTARYYCARDGYSNFHYYVMDYWGQGTSVTVSSGGGGSGGGGSGGGGSGGGGSDIVLTQSPASLAVSLGQRATISCRASESVEYYVTSLMQWYQQKPGQPPKLLISAASNVESGVPARFSGSGSGTDFSLNIHPVEEDDIAMYFCQQSRKVPWTFGGGTKLEIKR

SEQ ID NO: 4 - DNA, 2322 bp, Artificial sequence
  Synthetic polynucleotide
  misc_feature: 2H7sssIgG1-STD1-2e12LH (w/2e12 leader) (PN)
aagcttgccgccatggattttcaagtgcagattttcagcttcctgctaatcagtgcttcagtcataatgtccagaggacaaattgttctctcccagtctccagcaatcctgtctgcatctccaggggagaaggtcacaatgacttgcagggccagctcaagtgtaagttacatgcactggtaccagcagaagccaggatcctcccccaaaccctggatttatgccccatccaacctggcttctggagtccctgctcgcttcagtggcagtgggtctgggacctcttactctctcacaatcagcagagtggaggctgaagatgctgccacttattactgccagcagtggagttttaacccacccacgttcggtgctgggaccaagctggagctgaaagatggcggtggctcgggcggtggtggatctggaggaggtgggagctctcaggcttatctacagcagtctggggctgagtcggtgaggcctggggcctcagtgaagatgtcctgcaaggcttctggctacacatttaccagttacaatatgcactgggtaaagcagacacctagacagggcctggaatggattggagctatttatccaggaaatggtgatacttcctacaatcagaagttcaagggcaaggccacactgactgtagacaaatcctccagcacagcctacatgcagctcagcagcctgacatctgaagactctgcggtctatttctgtgcaagagtggtgtactatagtaactcttactggtacttcgatgtctggggcacagggaccacggtcaccgtctctgatcaggagcccaaatcttctgacaaaactcacacatccccaccgagcccagcacctgaactcctggggggaccgtcagtcttcctcttccccccaaaacccaaggacaccctcatgatctcccggacccctgaggtcacatgcgtggtggtggacgtgagccacgaagaccctgaggtcaagttcaactggtacgtggacggcgtggaggtgcataatgccaagacaaagccgcgggaggagcagtacaacagcacgtaccgtgtggtcagcgtcctcaccgtcctgcaccaggactggctgaatggcaaggagtacaagtgcaaggtctccaacaaagccctcccagcccccatcgagaaaacaatctccaaagccaaagggcagccccgagaaccacaggtgtacaccctgcccccatcccgggatgagctgaccaagaaccaggtcagcctgacctgcctggtcaaaggcttctatcccagcgacatcgccgtggagtgggagagcaatgggcagccggagaacaactacaagaccacgcctcccgtgctggactccgacggctccttcttcctctacagcaagctcaccgtggacaagagcaggtggcagcaggggaacgtcttctcatgctccgtgatgcatgaggctctgcacaaccactacacgcagaagagcctctccctgtctccgggtaagaattatggtggcggtggctcgggcggtggtggatctggaggaggtgggagtgggaattctgacattgtgctcacccaatctccagcttctttggctgtgtctctaggtcagagagccaccatctcctgcagagccagtgaaagtgttgaatattatgtcacaagtttaatgcagtggtaccaacagaaaccaggacagccacccaaactcctcatctctgctgctagcaacgtagaatctggggtccctgccaggtttagtggcagtgggtctgggacagactttagcctcaacatccatcctgtggaggaggatgatattgcaatgtatttctgtcagcaaagtaggaaggttccatggacgttcggtggaggcaccaagctggaaatcaaacggggtggcggtggatccggcggaggtgggtcgggtggcggcggatctcaggtgcagctgaaggagtcaggacctggcctggtggcgccctcacagagcctgtccatcacatgcaccgtctcagggttctcattaaccggctatggtgtaaactgggttcgccagcctccaggaaagggtctggagtggctgggaatgatatggggtgatggaagcacagactataattcagctctcaaatccagactatcgatcaccaaggacaactccaagagccaagttttcttaaaaatgaacagtctgcaaactgatgacacagccagatactactgtgctcgagatggttatagtaactttcattactatgttatggactactggggtcaaggaacctcagtcaccgtctcctcttaatctaga

SEQ ID NO: 5 - protein, 767 aa, Artificial sequence
  Synthetic polypeptide
  misc_feature: 2H7sssIgG1-STD1-2e12LH (w/2e12 leader) (AA)
  misc_feature (1)..(22): Leader
  misc_feature (23)..(128): VL
  misc_feature (129)..(144): Linker
  misc_feature (145)..(265): VH
  misc_feature (268)..(282): Hinge
  misc_feature (500)..(519): EFD-BD2 linker
  misc_feature (520)..(631): VL2
  misc_feature (632)..(646): Linker2
  misc_feature (647)..(767): VH2
MDFQVQIFSFLLISASVIMSRGQIVLSQSPAILSASPGEKVTMTCRASSSVSYMHWYQQKPGSSPKPWIYAPSNLASGVPARFSGSGSGTSYSLTISRVEAEDAATYYCQQWSFNPPTFGAGTKLELKDGGGSGGGGSGGGGSSQAYLQQSGAESVRPGASVKMSCKASGYTFTSYNMHWVKQTPRQGLEWIGAIYPGNGDTSYNQKFKGKATLTVDKSSSTAYMQLSSLTSEDSAVYFCARVVYYSNSYWYFDVWGTGTTVTVSDQEPKSSDKTHTSPPSSAPELLGGPSVFLFPPKPKDTLMISRTPEVTCVVVDVSHEDPEVKFNWYVDGVEVHNAKTKPREEQYNSTYRVVSVLTVLHQDWLNGKEYKCKVSNKALPAPIEKTISKAKGQPREPQVYTLPPSRDELTKNQVSLTCLVKGFYPSDIAVEWESNGQPENNYKTTPPVLDSDGSFFLYSKLTVDKSRWQQGNVFSCSVMHEALHNHYTQKSLSLSPGKNYGGGGSGGGGSGGGGSGNSDIVLTQSPASLAVSLGQRATISCRASESVEYYVTSLMQWYQQKPGQPPKLLISAASNVESGVPARFSGSGSGTDFSLNIHPVEEDDIAMYFCQQSRKVPWTFGGGTKLEIKRGGGGSGGGGSGGGGSQVQLKESGPGLVAPSQSLSITCTVSGFSLTGYGVNWVRQPPGKGLEWLGMIWGDGSTDYNSALKSRLSITKDNSKSQVFLKMNSLQTDDTARYYCARDGYSNFHYYVMDYWGQGTSVTVSS

SEQ ID NO: 6 - protein, 767 aa, Artificial sequence
  Synthetic polypeptide
  misc_feature: 2H7sssIgG1(P238S/P331S)-STD1-2e12LH (w/2e12 leader) (AA)
  misc_feature (1)..(22): Leader
  misc_feature (23)..(128): VL
  misc_feature (129)..(144): Linker
  misc_feature (145)..(265): VH
  misc_feature (268)..(282): Hinge
  misc_feature (500)..(519): EFD-BD2 Linker
  misc_feature (520)..(631): VL2
  misc_feature (632)..(646): Linker2
  misc_feature (647)..(767): VH2
MDFQVQIFSFLLISASVIMSRGQIVLSQSPAILSASPGEKVTMTCRASSSVSYMHWYQQKPGSSPKPWIYAPSNLASGVPARFSGSGSGTSYSLTISRVEAEDAATYYCQQWSFNPPTFGAGTKLELKDGGGSGGGGSGGGGSSQAYLQQSGAESVRPGASVKMSCKASGYTFTSYNMHWVKQTPRQGLEWIGAIYPGNGDTSYNQKFKGKATLTVDKSSSTAYMQLSSLTSEDSAVYFCARVVYYSNSYWYFDVWGTGTTVTVSDQEPKSSDKTHTSPPSSAPELLGGSSVFLFPPKPKDTLMISRTPEVTCVVVDVSHEDPEVKFNWYVDGVEVHNAKTKPREEQYNSTYRVVSVLTVLHQDWLNGKEYKCKVSNKALPASIEKTISKAKGQPREPQVYTLPPSRDELTKNQVSLTCLVKGFYPSDIAVEWESNGQPENNYKTTPPVLDSDGSFFLYSKLTVDKSRWQQGNVFSCSVMHEALHNHYTQKSLSLSPGKNYGGGGSGGGGSGGGGSGNSDIVLTQSPASLAVSLGQRATISCRASESVEYYVTSLMQWYQQKPGQPPKLLISAASNVESGVPARFSGSGSGTDFSLNIHPVEEDDIAMYFCQQSRKVPWTFGGGTKLEIKRGGGGSGGGGSGGGGSQVQLKESGPGLVAPSQSLSITCTVSGFSLTGYGVNWVRQPPGKGLEWLGMIWGDGSTDYNSALKSRLSITKDNSKSQVFLKMNSLQTDDTARYYCARDGYSNFHYYVMDYWGQGTSVTVSS

SEQ ID NO: 7 - DNA, 2376 bp, Artificial sequence
  Synthetic polynucleotide
  misc_feature: 2H7sssIgG1-STD2-2e12LH (w/2e12 leader) (PN)
aagcttgccgccatggattttcaagtgcagattttcagcttcctgctaatcagtgcttcagtcataatgtccagaggacaaattgttctctcccagtctccagcaatcctgtctgcatctccaggggagaaggtcacaatgacttgcagggccagctcaagtgtaagttacatgcactggtaccagcagaagccaggatcctcccccaaaccctggatttatgccccatccaacctggcttctggagtccctgctcgcttcagtggcagtgggtctgggacctcttactctctcacaatcagcagagtggaggctgaagatgctgccacttattactgccagcagtggagttttaacccacccacgttcggtgctgggaccaagctggagctgaaagatggcggtggctcgggcggtggtggatctggaggaggtgggagctctcaggcttatctacagcagtctggggctgagtcggtgaggcctggggcctcagtgaagatgtcctgcaaggcttctggctacacatttaccagttacaatatgcactgggtaaagcagacacctagacagggcctggaatggattggagctatttatccaggaaatggtgatacttcctacaatcagaagttcaagggcaaggccacactgactgtagacaaatcctccagcacagcctacatgcagctcagcagcctgacatctgaagactctgcggtctatttctgtgcaagagtggtgtactatagtaactcttactggtacttcgatgtctggggcacagggaccacggtcaccgtctctgatcaggagcccaaatcttctgacaaaactcacacatccccaccgagcccagcacctgaactcctggggggaccgtcagtcttcctcttccccccaaaacccaaggacaccctcatgatctcccggacccctgaggtcacatgcgtggtggtggacgtgagccacgaagaccctgaggtcaagttcaactggtacgtggacggcgtggaggtgcataatgccaagacaaagccgcgggaggagcagtacaacagcacgtaccgtgtggtcagcgtcctcaccgtcctgcaccaggactggctgaatggcaaggagtacaagtgcaaggtctccaacaaagccctcccagcccccatcgagaaaacaatctccaaagccaaagggcagccccgagaaccacaggtgtacaccctgcccccatcccgggatgagctgaccaagaaccaggtcagcctgacctgcctggtcaaaggcttctatcccagcgacatcgccgtggagtgggagagcaatgggcagccggagaacaactacaagaccacgcctcccgtgctggactccgacggctccttcttcctctacagcaagctcaccgtggacaagagcaggtggcagcaggggaacgtcttctcatgctccgtgatgcatgaggctctgcacaaccactacacgcagaagagcctctccctgtctccgggtaagaattatggtggcggtggctcgggcggtggtggatctggaggaggtgggagtgggaattatggtggcggtggctcgggcggtggtggatctggaggaggtgggagtgggaattctgacattgtgctcacccaatctccagcttctttggctgtgtctctaggtcagagagccaccatctcctgcagagccagtgaaagtgttgaatattatgtcacaagtttaatgcagtggtaccaacagaaaccaggacagccacccaaactcctcatctctgctgctagcaacgtagaatctggggtccctgccaggtttagtggcagtgggtctgggacagactttagcctcaacatccatcctgtggaggaggatgatattgcaatgtatttctgtcagcaaagtaggaaggttccatggacgttcggtggaggcaccaagctggaaatcaaacggggtggcggtggatccggcggaggtgggtcgggtggcggcggatctcaggtgcagctgaaggagtcaggacctggcctggtggcgccctcacagagcctgtccatcacatgcaccgtctcagggttctcattaaccggctatggtgtaaactgggttcgccagcctccaggaaagggtctggagtggctgggaatgatatggggtgatggaagcacagactataattcagctctcaaatccagactatcgatcaccaaggacaactccaagagccaagttttcttaaaaatgaacagtctgcaaactgatgacacagccagatactactgtgctcgagatggttatagtaactttcattactatgttatggactactggggtcaaggaacctcagtcaccgtctcctcttaatctaga

SEQ ID NO: 8 - protein, 785 aa, Artificial sequence
  Synthetic polypeptide
  misc_feature: 2H7sssIgG1-STD2-2e12LH (w/2e12 leader) (AA)
  misc_feature (1)..(22): Leader
  misc_feature (23)..(129): VL
  misc_feature (130)..(144): Linker
  misc_feature (145)..(265): VH
  misc_feature (268)..(282): Hinge
  misc_feature (500)..(537): EFD-BD2 Linker
  misc_feature (538)..(649): VL2
  misc_feature (650)..(664): Linker2
  misc_feature (665)..(795): VH2
MDFQVQIFSFLLISASVIMSRGQIVLSQSPAILSASPGEKVTMTCRASSSVSYMHWYQQKPGSSPKPWIYAPSNLASGVPARFSGSGSGTSYSLTISRVEAEDAATYYCQQWSFNPPTFGAGTKLELKDGGGSGGGGSGGGGSSQAYLQQSGAESVRPGASVKMSCKASGYTFTSYNMHWVKQTPRQGLEWIGAIYPGNGDTSYNQKFKGKATLTVDKSSSTAYMQLSSLTSEDSAVYFCARVVYYSNSYWYFDVWGTGTTVTVSDQEPKSSDKTHTSPPSSAPELLGGPSVFLFPPKPKDTLMISRTPEVTCVVVDVSHEDPEVKFNWYVDGVEVHNAKTKPREEQYNSTYRVVSVLTVLHQDWLNGKEYKCKVSNKALPAPIEKTISKAKGQPREPQVYTLPPSRDELTKNQVSLTCLVKGFYPSDIAVEWESNGQPENNYKTTPPVLDSDGSFFLYSKLTVDKSRWQQGNVFSCSVMHEALHNHYTQKSLSLSPGKNYGGGGSGGGGSGGGGSGNYGGGGSGGGGSGGGGSGNSDIVLTQSPASLAVSLGQRATISCRASESVEYYVTSLMQWYQQKPGQPPKLLISAASNVESGVPARFSGSGSGTDFSLNIHPVEEDDIAMYFCQQSRKVPWTFGGGTKLEIKRGGGGSGGGGSGGGGSQVQLKESGPGLVAPSQSLSITCTVSGFSLTGYGVNWVRQPPGKGLEWLGMIWGDGSTDYNSALKSRLSITKDNSKSQVFLKMNSLQTDDTARYYCARDGYSNFHYYVMDYWGQGTSVTVSS

SEQ ID NO: 9 - protein, 785 aa, Artificial sequence
  Synthetic polypeptide
  misc_feature: 2H7sssIgG1(P238S/P331S)-STD2-2e12LH (w/2e12 leader) (AA)
  misc_feature (1)..(22): Leader
  misc_feature (23)..(128): VL
  misc_feature (129)..(144): Linker
  misc_feature (145)..(265): VH
  misc_feature (268)..(281): Hinge
  misc_feature (500)..(537): EFD-BD2 Linker
  misc_feature (538)..(649): VL2
  misc_feature (650)..(664): Linker2
  misc_feature (665)..(785): VH2
MDFQVQIFSFLLISASVIMSRGQIVLSQSPAILSASPGEKVTMTCRASSSVSYMHWYQQKPGSSPKPWIYAPSNLASGVPARFSGSGSGTSYSLTISRVEAEDAATYYCQQWSFNPPTFGAGTKLELKDGGGSGGGGSGGGGSSQAYLQQSGAESVRPGASVKMSCKASGYTFTSYNMHWVKQTPRQGLEWIGAIYPGNGDTSYNQKFKGKATLTVDKSSSTAYMQLSSLTSEDSAVYFCARVVYYSNSYWYFDVWGTGTTVTVSDQEPKSSDKTHTSPPSSAPELLGGSSVFLFPPKPKDTLMISRTPEVTCVVVDVSHEDPEVKFNWYVDGVEVHNAKTKPREEQYNSTYRVVSVLTVLHQDWLNGKEYKCKVSNKALPASIEKTISKAKGQPREPQVYTLPPSRDELTKNQVSLTCLVKGFYPSDIAVEWESNGQPENNYKTTPPVLDSDGSFFLYSKLTVDKSRWQQGNVFSCSVMHEALHNHYTQKSLSLSPGKNYGGGGSGGGGSGGGGSGNYGGGGSGGGGSGGGGSGNSDIVLTQSPASLAVSLGQRATISCRASESVEYYVTSLMQWYQQKPGQPPKLLISAASNVESGVPARFSGSGSGTDFSLNIHPVEEDDIAMYFCQQSRKVPWTFGGGTKLEIKRGGGGSGGGGSGGGGSQVQLKESGPGLVAPSQSLSITCTVSGFSLTGYGVNWVRQPPGKGLEWLGMIWGDGSTDYNSALKSRLSITKDNSKSQVFLKMNSLQTDDTARYYCARDGYSNFHYYVMDYWGQGTSVTVSS

SEQ ID NO: 10 - DNA, 2391 bp, Artificial sequence
  Synthetic polynucleotide
  misc_feature: 2H7sssIgG1-STD2-2e12HL (w/2e12 leader) (PN)
aagcttgccgccatggattttcaagtgcagattttcagcttcctgctaatcagtgcttcagtcataatgtccagaggacaaattgttctctcccagtctccagcaatcctgtctgcatctccaggggagaaggtcacaatgacttgcagggccagctcaagtgtaagttacatgcactggtaccagcagaagccaggatcctcccccaaaccctggatttatgccccatccaacctggcttctggagtccctgctcgcttcagtggcagtgggtctgggacctcttactctctcacaatcagcagagtggaggctgaagatgctgccacttattactgccagcagtggagttttaacccacccacgttcggtgctgggaccaagctggagctgaaagatggcggtggctcgggcggtggtggatctggaggaggtgggagctctcaggcttatctacagcagtctggggctgagtcggtgaggcctggggcctcagtgaagatgtcctgcaaggcttctggctacacatttaccagttacaatatgcactgggtaaagcagacacctagacagggcctggaatggattggagctatttatccaggaaatggtgatacttcctacaatcagaagttcaagggcaaggccacactgactgtagacaaatcctccagcacagcctacatgcagctcagcagcctgacatctgaagactctgcggtctatttctgtgcaagagtggtgtactatagtaactcttactggtacttcgatgtctggggcacagggaccacggtcaccgtctctgatcaggagcccaaatcttctgacaaaactcacacatccccaccgagcccagcacctgaactcctggggggaccgtcagtcttcctcttccccccaaaacccaaggacaccctcatgatctcccggacccctgaggtcacatgcgtggtggtggacgtgagccacgaagaccctgaggtcaagttcaactggtacgtggacggcgtggaggtgcataatgccaagacaaagccgcgggaggagcagtacaacagcacgtaccgtgtggtcagcgtcctcaccgtcctgcaccaggactggctgaatggcaaggagtacaagtgcaaggtctccaacaaagccctcccagcccccatcgagaaaacaatctccaaagccaaagggcagccccgagaaccacaggtgtacaccctgcccccatcccgggatgagctgaccaagaaccaggtcagcctgacctgcctggtcaaaggcttctatcccagcgacatcgccgtggagtgggagagcaatgggcagccggagaacaactacaagaccacgcctcccgtgctggactccgacggctccttcttcctctacagcaagctcaccgtggacaagagcaggtggcagcaggggaacgtcttctcatgctccgtgatgcatgaggctctgcacaaccactacacgcagaagagcctctccctgtctccgggtaagaattatggtggcggtggctcgggcggtggtggatctggaggaggtgggagtgggaattatggtggcggtggctcgggcggtggtggatctggaggaggtgggagtgggaattctcaggtgcagctgaaggagtcaggacctggcctggtggcgccctcacagagcctgtccatcacatgcaccgtctcagggttctcattaaccggctatggtgtaaactgggttcgccagcctccaggaaagggtctggagtggctgggaatgatatggggtgatggaagcacagactataattcagctctcaaatccagactatcgatcaccaaggacaactccaagagccaagttttcttaaaaatgaacagtctgcaaactgatgacacagccagatactactgtgctcgagatggttatagtaactttcattactatgttatggactactggggtcaaggaacctcagtcaccgtctcctctgggggtggaggctctggtggcggtggatccggcggaggtgggtcgggtggcggcggatctgacattgtgctcacccaatctccagcttctttggctgtgtctctaggtcagagagccaccatctcctgcagagccagtgaaagtgttgaatattatgtcacaagtttaatgcagtggtaccaacagaaaccaggacagccacccaaactcctcatctctgctgctagcaacgtagaatctggggtccctgccaggtttagtggcagtgggtctgggacagactttagcctcaacatccatcctgtggaggaggatgatattgcaatgtatttctgtcagcaaagtaggaaggttccatggacgttcggtggaggcaccaagctggaaatcaaacgttaatctaga

SEQ ID NO: 11 - protein, 790 aa, Artificial sequence
  Synthetic polypeptide
  misc_feature: 2H7sssIgG1-STD2-2e12HL (w/2e12 leader) (AA)
  misc_feature (1)..(22): Leader
  misc_feature (23)..(128): VL
  misc_feature (129)..(144): Linker
  misc_feature (145)..(265): VH
  misc_feature (268)..(282): Hinge
  misc_feature (500)..(537): EFD-BD2 Linker
  misc_feature (538)..(658): VH2
  misc_feature (659)..(678): Linker2
  misc_feature (679)..(790): VL2
MDFQVQIFSFLLISASVIMSRGQIVLSQSPAILSASPGEKVTMTCRASSSVSYMHWYQQKPGSSPKPWIYAPSNLASGVPARFSGSGSGTSYSLTISRVEAEDAATYYCQQWSFNPPTFGAGTKLELKDGGGSGGGGSGGGGSSQAYLQQSGAESVRPGASVKMSCKASGYTFTSYNMHWVKQTPRQGLEWIGAIYPGNGDTSYNQKFKGKATLTVDKSSSTAYMQLSSLTSEDSAVYFCARVVYYSNSYWYFDVWGTGTTVTVSDQEPKSSDKTHTSPPSSAPELLGGPSVFLFPPKPKDTLMISRTPEVTCVVVDVSHEDPEVKFNWYVDGVEVHNAKTKPREEQYNSTYRVVSVLTVLHQDWLNGKEYKCKVSNKALPAPIEKTISKAKGQPREPQVYTLPPSRDELTKNQVSLTCLVKGFYPSDIAVEWESNGQPENNYKTTPPVLDSDGSFFLYSKLTVDKSRWQQGNVFSCSVMHEALHNHYTQKSLSLSPGKNYGGGGSGGGGSGGGGSGNYGGGGSGGGGSGGGGSGNSQVQLKESGPGLVAPSQSLSITCTVSGFSLTGYGVNWVRQPPGKGLEWLGMIWGDGSTDYNSALKSRLSITKDNSKSQVFLKMNSLQTDDTARYYCARDGYSNFHYYVMDYWGQGTSVTVSSGGGGSGGGGSGGGGSGGGGSDIVLTQSPASLAVSLGQRATISCRASESVEYYVTSLMQWYQQKPGQPPKLLISAASNVESGVPARFSGSGSGTDFSLNIHPVEEDDIAMYFCQQSRKVPWTFGGGTKLEIKR

SEQ ID NO: 12 - protein, 790 aa, Artificial sequence
  Synthetic polypeptide
  misc_feature: 2H7sssIgG1(P238S/P331S)-STD2-2e12HL (w/2e12 leader) (AA)
  misc_feature (1)..(22): Leader
  misc_feature (23)..(128): VL
  misc_feature (129)..(144): Linker
  misc_feature (145)..(265): VH
  misc_feature (268)..(282): Hinge
  misc_feature (500)..(537): EFD-BD2 Linker
  misc_feature (538)..(658): VH2
  misc_feature (659)..(678): Linker2
  misc_feature (679)..(790): VL2
MDFQVQIFSFLLISASVIMSRGQIVLSQSPAILSASPGEKVTMTCRASSSVSYMHWYQQKPGSSPKPWIYAPSNLASGVPARFSGSGSGTSYSLTISRVEAEDAATYYCQQWSFNPPTFGAGTKLELKDGGGSGGGGSGGGGSSQAYLQQSGAESVRPGASVKMSCKASGYTFTSYNMHWVKQTPRQGLEWIGAIYPGNGDTSYNQKFKGKATLTVDKSSSTAYMQLSSLTSEDSAVYFCARVVYYSNSYWYFDVWGTGTTVTVSDQEPKSSDKTHTSPPSSAPELLGGSSVFLFPPKPKDTLMISRTPEVTCVVVDVSHEDPEVKFNWYVDGVEVHNAKTKPREEQYNSTYRVVSVLTVLHQDWLNGKEYKCKVSNKALPASIEKTISKAKGQPREPQVYTLPPSRDELTKNQVSLTCLVKGFYPSDIAVEWESNGQPENNYKTTPPVLDSDGSFFLYSKLTVDKSRWQQGNVFSCSVMHEALHNHYTQKSLSLSPGKNYGGGGSGGGGSGGGGSGNYGGGGSGGGGSGGGGSGNSQVQLKESGPGLVAPSQSLSITCTVSGFSLTGYGVNWVRQPPGKGLEWLGMIWGDGSTDYNSALKSRLSITKDNSKSQVFLKMNSLQTDDTARYYCARDGYSNFHYYVMDYWGQGTSVTVSSGGGGSGGGGSGGGGSGGGGSDIVLTQSPASLAVSLGQRATISCRASESVEYYVTSLMQWYQQKPGQPPKLLISAASNVESGVPARFSGSGSGTDFSLNIHPVEEDDIAMYFCQQSRKVPWTFGGGTKLEIKR

SEQ ID NO: 13 - DNA, 2283 bp, Artificial sequence
  Synthetic polynucleotide
  misc_feature: 2H7sssIgG1-H1-2e12HL (w/2e12 leader) (PN)
aagcttgccgccatggattttcaagtgcagattttcagcttcctgctaatcagtgcttcagtcataatgtccagaggacaaattgttctctcccagtctccagcaatcctgtctgcatctccaggggagaaggtcacaatgacttgcagggccagctcaagtgtaagttacatgcactggtaccagcagaagccaggatcctcccccaaaccctggatttatgccccatccaacctggcttctggagtccctgctcgcttcagtggcagtgggtctgggacctcttactctctcacaatcagcagagtggaggctgaagatgctgccacttattactgccagcagtggagttttaacccacccacgttcggtgctgggaccaagctggagctgaaagatggcggtggctcgggcggtggtggatctggaggaggtgggagctctcaggcttatctacagcagtctggggctgagtcggtgaggcctggggcctcagtgaagatgtcctgcaaggcttctggctacacatttaccagttacaatatgcactgggtaaagcagacacctagacagggcctggaatggattggagctatttatccaggaaatggtgatacttcctacaatcagaagttcaagggcaaggccacactgactgtagacaaatcctccagcacagcctacatgcagctcagcagcctgacatctgaagactctgcggtctatttctgtgcaagagtggtgtactatagtaactcttactggtacttcgatgtctggggcacagggaccacggtcaccgtctctgatcaggagcccaaatcttctgacaaaactcacacatccccaccgagcccagcacctgaactcctggggggaccgtcagtcttcctcttccccccaaaacccaaggacaccctcatgatctcccggacccctgaggtcacatgcgtggtggtggacgtgagccacgaagaccctgaggtcaagttcaactggtacgtggacggcgtggaggtgcataatgccaagacaaagccgcgggaggagcagtacaacagcacgtaccgtgtggtcagcgtcctcaccgtcctgcaccaggactggctgaatggcaaggagtacaagtgcaaggtctccaacaaagccctcccagcccccatcgagaaaacaatctccaaagccaaagggcagccccgagaaccacaggtgtacaccctgcccccatcccgggatgagctgaccaagaaccaggtcagcctgacctgcctggtcaaaggcttctatcccagcgacatcgccgtggagtgggagagcaatgggcagccggagaacaactacaagaccacgcctcccgtgctggactccgacggctccttcttcctctacagcaagctcaccgtggacaagagcaggtggcagcaggggaacgtcttctcatgctccgtgatgcatgaggctctgcacaaccactacacgcagaagagcctctccctgtctccgggtaagaattctcaggtgcagctgaaggagtcaggacctggcctggtggcgccctcacagagcctgtccatcacatgcaccgtctcagggttctcattaaccggctatggtgtaaactgggttcgccagcctccaggaaagggtctggagtggctgggaatgatatggggtgatggaagcacagactataattcagctctcaaatccagactatcgatcaccaaggacaactccaagagccaagttttcttaaaaatgaacagtctgcaaactgatgacacagccagatactactgtgctcgagatggttatagtaactttcattactatgttatggactactggggtcaaggaacctcagtcaccgtctcctctgggggtggaggctctggtggcggtggatccggcggaggtgggtcgggtggcggcggatctgacattgtgctcacccaatctccagcttctttggctgtgtctctaggtcagagagccaccatctcctgcagagccagtgaaagtgttgaatattatgtcacaagtttaatgcagtggtaccaacagaaaccaggacagccacccaaactcctcatctctgctgctagcaacgtagaatctggggtccctgccaggtttagtggcagtgggtctgggacagactttagcctcaacatccatcctgtggaggaggatgatattgcaatgtatttctgtcagcaaagtaggaaggttccatggacgttcggtggaggcaccaagctggaaatcaaacgttaatctaga

SEQ ID NO: 14 - protein, 754 aa, Artificial sequence
  Synthetic polypeptide
  misc_feature: 2H7sssIgG1-H1-2e12HL (w/2e12 leader) (AA)
  misc_feature (1)..(22): Leader
  misc_feature (23)..(128): VL
  misc_feature (129)..(144): Linker
  misc_feature (145)..(265): VH
  misc_feature (268)..(281): Hinge
  misc_feature (500)..(501): EFD-BD2 Linker
  misc_feature (502)..(622): VH2
  misc_feature (623)..(642): Linker2
  misc_feature (643)..(754): VL2
MDFQVQIFSFLLISASVIMSRGQIVLSQSPAILSASPGEKVTMTCRASSSVSYMHWYQQKPGSSPKPWIYAPSNLASGVPARFSGSGSGTSYSLTISRVEAEDAATYYCQQWSFNPPTFGAGTKLELKDGGGSGGGGSGGGGSSQAYLQQSGAESVRPGASVKMSCKASGYTFTSYNMHWVKQTPRQGLEWIGAIYPGNGDTSYNQKFKGKATLTVDKSSSTAYMQLSSLTSEDSAVYFCARVVYYSNSYWYFDVWGTGTTVTVSDQEPKSSDKTHTSPPSPAPELLGGPSVFLFPPKPKDTLMISRTPEVTCVVVDVSHEDPEVKFNWYVDGVEVHNAKTKPREEQYNSTYRVVSVLTVLHQDWLNGKEYKCKVSNKALPAPIEKTISKAKGQPREPQVYTLPPSRDELTKNQVSLTCLVKGFYPSDIAVEWESNGQPENNYKTTPPVLDSDGSFFLYSKLTVDKSRWQQGNVFSCSVMHEALHNHYTQKSLSLSPGKNSQVQLKESGPGLVAPSQSLSITCTVSGFSLTGYGVNWVRQPPGKGLEWLGMIWGDGSTDYNSALKSRLSITKDNSKSQVFLKMNSLQTDDTARYYCARDGYSNFHYYVMDYWGQGTSVTVSSGGGGSGGGGSGGGGSGGGGSDIVLTQSPASLAVSLGQRATISCRASESVEYYVTSLMQWYQQKPGQPPKLLISAASNVESGVPARFSGSGSGTDFSLNIHPVEEDDIAMYFCQQSRKVPWTFGGGTKLEIKR

SEQ ID NO: 15 - DNA, 2301 bp, Artificial sequence
  Synthetic polynucleotide
  misc_feature: 2H7sssIgG1-H2-2e12HL (w/2e12 leader) (PN)
aagcttgccgccatggattttcaagtgcagattttcagcttcctgctaatcagtgcttcagtcataatgtccagaggacaaattgttctctcccagtctccagcaatcctgtctgcatctccaggggagaaggtcacaatgacttgcagggccagctcaagtgtaagttacatgcactggtaccagcagaagccaggatcctcccccaaaccctggatttatgccccatccaacctggcttctggagtccctgctcgcttcagtggcagtgggtctgggacctcttactctctcacaatcagcagagtggaggctgaagatgctgccacttattactgccagcagtggagttttaacccacccacgttcggtgctgggaccaagctggagctgaaagatggcggtggctcgggcggtggtggatctggaggaggtgggagctctcaggcttatctacagcagtctggggctgagtcggtgaggcctggggcctcagtgaagatgtcctgcaaggcttctggctacacatttaccagttacaatatgcactgggtaaagcagacacctagacagggcctggaatggattggagctatttatccaggaaatggtgatacttcctacaatcagaagttcaagggcaaggccacactgactgtagacaaatcctccagcacagcctacatgcagctcagcagcctgacatctgaagactctgcggtctatttctgtgcaagagtggtgtactatagtaactcttactggtacttcgatgtctggggcacagggaccacggtcaccgtctctgatcaggagcccaaatcttctgacaaaactcacacatccccaccgagcccagcacctgaactcctggggggaccgtcagtcttcctcttccccccaaaacccaaggacaccctcatgatctcccggacccctgaggtcacatgcgtggtggtggacgtgagccacgaagaccctgaggtcaagttcaactggtacgtggacggcgtggaggtgcataatgccaagacaaagccgcgggaggagcagtacaacagcacgtaccgtgtggtcagcgtcctcaccgtcctgcaccaggactggctgaatggcaaggagtacaagtgcaaggtctccaacaaagccctcccagcccccatcgagaaaacaatctccaaagccaaagggcagccccgagaaccacaggtgtacaccctgcccccatcccgggatgagctgaccaagaaccaggtcagcctgacctgcctggtcaaaggcttctatcccagcgacatcgccgtggagtgggagagcaatgggcagccggagaacaactacaagaccacgcctcccgtgctggactccgacggctccttcttcctctacagcaagctcaccgtggacaagagcaggtggcagcaggggaacgtcttctcatgctccgtgatgcatgaggctctgcacaaccactacacgcagaagagcctctccctgtctccgggtaagggtggcggtggctcggggaattctcaggtgcagctgaaggagtcaggacctggcctggtggcgccctcacagagcctgtccatcacatgcaccgtctcagggttctcattaaccggctatggtgtaaactgggttcgccagcctccaggaaagggtctggagtggctgggaatgatatggggtgatggaagcacagactataattcagctctcaaatccagactatcgatcaccaaggacaactccaagagccaagttttcttaaaaatgaacagtctgcaaactgatgacacagccagatactactgtgctcgagatggttatagtaactttcattactatgttatggactactggggtcaaggaacctcagtcaccgtctcctctgggggtggaggctctggtggcggtggatccggcggaggtgggtcgggtggcggcggatctgacattgtgctcacccaatctccagcttctttggctgtgtctctaggtcagagagccaccatctcctgcagagccagtgaaagtgttgaatattatgtcacaagtttaatgcagtggtaccaacagaaaccaggacagccacccaaactcctcatctctgctgctagcaacgtagaatctggggtccctgccaggtttagtggcagtgggtctgggacagactttagcctcaacatccatcctgtggaggaggatgatattgcaatgtatttctgtcagcaaagtaggaaggttccatggacgttcggtggaggcaccaagctggaaatcaaacgttaatctaga

SEQ ID NO: 16 - protein, 760 aa, Artificial sequence
  Synthetic polypeptide
  misc_feature: 2H7sssIgG1-H2-2e12HL (w/2e12 leader) (AA)
  misc_feature (1)..(22): Leader
  misc_feature (23)..(127): VL
  misc_feature (128)..(144): Linker
  misc_feature (145)..(265): VH
  misc_feature (268)..(282): Hinge
  misc_feature (500)..(507): EFD-BD2 Linker
  misc_feature (629)..(648): Linker2
  misc_feature (649)..(760): VL2
MDFQVQIFSFLLISASVIMSRGQIVLSQSPAILSASPGEKVTMTCRASSSVSYMHWYQQKPGSSPKPWIYAPSNLASGVPARFSGSGSGTSYSLTISRVEAEDAATYYCQQWSFNPPTFGAGTKLELKDGGGSGGGGSGGGGSSQAYLQQSGAESVRPGASVKMSCKASGYTFTSYNMHWVKQTPRQGLEWIGAIYPGNGDTSYNQKFKGKATLTVDKSSSTAYMQLSSLTSEDSAVYFCARVVYYSNSYWYFDVWGTGTTVTVSDQEPKSSDKTHTSPPSPAPELLGGPSVFLFPPKPKDTLMISRTPEVTCVVVDVSHEDPEVKFNWYVDGVEVHNAKTKPREEQYNSTYRVVSVLTVLHQDWLNGKEYKCKVSNKALPAPIEKTISKAKGQPREPQVYTLPPSRDELTKNQVSLTCLVKGFYPSDIAVEWESNGQPENNYKTTPPVLDSDGSFFLYSKLTVDKSRWQQGNVFSCSVMHEALHNHYTQKSLSLSPGKGGGGSGNSQVQLKESGPGLVAPSQSLSITCTVSGFSLTGYGVNWVRQPPGKGLEWLGMIWGDGSTDYNSALKSRLSITKDNSKSQVFLKMNSLQTDDTARYYCARDGYSNFHYYVMDYWGQGTSVTVSSGGGGSGGGGSGGGGSGGGGSDIVLTQSPASLAVSLGQRATISCRASESVEYYVTSLMQWYQQKPGQPPKLLISAASNVESGVPARFSGSGSGTDFSLNIHPVEEDDIAMYFCQQSRKVPWTFGGGTKLEIKR

SEQ ID NO: 17 - DNA, 2307 bp, Artificial sequence
  Synthetic polynucleotide
  misc_feature: 2H7sssIgG1-H3-2e12HL (w/e12 leader) (PN)
aagcttgccgccatggattttcaagtgcagattttcagcttcctgctaatcagtgcttcagtcataatgtccagaggacaaattgttctctcccagtctccagcaatcctgtctgcatctccaggggagaaggtcacaatgacttgcagggccagctcaagtgtaagttacatgcactggtaccagcagaagccaggatcctcccccaaaccctggatttatgccccatccaacctggcttctggagtccctgctcgcttcagtggcagtgggtctgggacctcttactctctcacaatcagcagagtggaggctgaagatgctgccacttattactgccagcagtggagttttaacccacccacgttcggtgctgggaccaagctggagctgaaagatggcggtggctcgggcggtggtggatctggaggaggtgggagctctcaggcttatctacagcagtctggggctgagtcggtgaggcctggggcctcagtgaagatgtcctgcaaggcttctggctacacatttaccagttacaatatgcactgggtaaagcagacacctagacagggcctggaatggattggagctatttatccaggaaatggtgatacttcctacaatcagaagttcaagggcaaggccacactgactgtagacaaatcctccagcacagcctacatgcagctcagcagcctgacatctgaagactctgcggtctatttctgtgcaagagtggtgtactatagtaactcttactggtacttcgatgtctggggcacagggaccacggtcaccgtctctgatcaggagcccaaatcttctgacaaaactcacacatccccaccgagcccagcacctgaactcctggggggaccgtcagtcttcctcttccccccaaaacccaaggacaccctcatgatctcccggacccctgaggtcacatgcgtggtggtggacgtgagccacgaagaccctgaggtcaagttcaactggtacgtggacggcgtggaggtgcataatgccaagacaaagccgcgggaggagcagtacaacagcacgtaccgtgtggtcagcgtcctcaccgtcctgcaccaggactggctgaatggcaaggagtacaagtgcaaggtctccaacaaagccctcccagcccccatcgagaaaacaatctccaaagccaaagggcagccccgagaaccacaggtgtacaccctgcccccatcccgggatgagctgaccaagaaccaggtcagcctgacctgcctggtcaaaggcttctatcccagcgacatcgccgtggagtgggagagcaatgggcagccggagaacaactacaagaccacgcctcccgtgctggactccgacggctccttcttcctctacagcaagctcaccgtggacaagagcaggtggcagcaggggaacgtcttctcatgctccgtgatgcatgaggctctgcacaaccactacacgcagaagagcctctccctgtctccgggtaagaattatggtggcggtggctctgggaattctcaggtgcagctgaaggagtcaggacctggcctggtggcgccctcacagagcctgtccatcacatgcaccgtctcagggttctcattaaccggctatggtgtaaactgggttcgccagcctccaggaaagggtctggagtggctgggaatgatatggggtgatggaagcacagactataattcagctctcaaatccagactatcgatcaccaaggacaactccaagagccaagttttcttaaaaatgaacagtctgcaaactgatgacacagccagatactactgtgctcgagatggttatagtaactttcattactatgttatggactactggggtcaaggaacctcagtcaccgtctcctctgggggtggaggctctggtggcggtggatccggcggaggtgggtcgggtggcggcggatctgacattgtgctcacccaatctccagcttctttggctgtgtctctaggtcagagagccaccatctcctgcagagccagtgaaagtgttgaatattatgtcacaagtttaatgcagtggtaccaacagaaaccaggacagccacccaaactcctcatctctgctgctagcaacgtagaatctggggtccctgccaggtttagtggcagtgggtctgggacagactttagcctcaacatccatcctgtggaggaggatgatattgcaatgtatttctgtcagcaaagtaggaaggttccatggacgttcggtggaggcaccaagctggaaatcaaacgttaatctaga

SEQ ID NO: 18 - protein, 762 aa, Artificial sequence
  Synthetic polypeptide
  misc_feature: 2H7sssIgG1-H3-2e12HL (w/e12 leader) (AA)
  misc_feature (1)..(22): Leader
  misc_feature (23)..(128): VL
  misc_feature (129)..(144): Linker
  misc_feature (145)..(265): VH
  misc_feature (268)..(282): Hinge
  misc_feature (500)..(509): EFD-BD2 Linker
  misc_feature (510)..(630): VH2
  misc_feature (631)..(650): Linker2
  misc_feature (651)..(762): VL2
MDFQVQIFSFLLISASVIMSRGQIVLSQSPAILSASPGEKVTMTCRASSSVSYMHWYQQKPGSSPKPWIYAPSNLASGVPARFSGSGSGTSYSLTISRVEAEDAATYYCQQWSFNPPTFGAGTKLELKDGGGSGGGGSGGGGSSQAYLQQSGAESVRPGASVKMSCKASGYTFTSYNMHWVKQTPRQGLEWIGAIYPGNGDTSYNQKFKGKATLTVDKSSSTAYMQLSSLTSEDSAVYFCARVVYYSNSYWYFDVWGTGTTVTVSDQEPKSSDKTHTSPPSPAPELLGGPSVFLFPPKPKDTLMISRTPEVTCVVVDVSHEDPEVKFNWYVDGVEVHNAKTKPREEQYNSTYRVVSVLTVLHQDWLNGKEYKCKVSNKALPAPIEKTISKAKGQPREPQVYTLPPSRDELTKNQVSLTCLVKGFYPSDIAVEWESNGQPENNYKTTPPVLDSDGSFFLYSKLTVDKSRWQQGNVFSCSVMHEALHNHYTQKSLSLSPGKNYGGGGSGNSQVQLKESGPGLVAPSQSLSITCTVSGFSLTGYGVNWVRQPPGKGLEWLGMIWGDGSTDYNSALKSRLSITKDNSKSQVFLKMNSLQTDDTARYYCARDGYSNFHYYVMDYWGQGTSVTVSSGGGGSGGGGSGGGGSGGGGSDIVLTQSPASLAVSLGQRATISCRASESVEYYVTSLMQWYQQKPGQPPKLLISAASNVESGVPARFSGSGSGTDFSLNIHPVEEDDIAMYFCQQSRKVPWTFGGGTKLEIKR

SEQ ID NO: 19 - DNA, 2316 bp, Artificial sequence
  Synthetic polynucleotide
  misc_feature: 2H7sssIgG1-H4-2e12HL (PN)
aagcttgccgccatggattttcaagtgcagattttcagcttcctgctaatcagtgcttcagtcataatgtccagaggacaaattgttctctcccagtctccagcaatcctgtctgcatctccaggggagaaggtcacaatgacttgcagggccagctcaagtgtaagttacatgcactggtaccagcagaagccaggatcctcccccaaaccctggatttatgccccatccaacctggcttctggagtccctgctcgcttcagtggcagtgggtctgggacctcttactctctcacaatcagcagagtggaggctgaagatgctgccacttattactgccagcagtggagttttaacccacccacgttcggtgctgggaccaagctggagctgaaagatggcggtggctcgggcggtggtggatctggaggaggtgggagctctcaggcttatctacagcagtctggggctgagtcggtgaggcctggggcctcagtgaagatgtcctgcaaggcttctggctacacatttaccagttacaatatgcactgggtaaagcagacacctagacagggcctggaatggattggagctatttatccaggaaatggtgatacttcctacaatcagaagttcaagggcaaggccacactgactgtagacaaatcctccagcacagcctacatgcagctcagcagcctgacatctgaagactctgcggtctatttctgtgcaagagtggtgtactatagtaactcttactggtacttcgatgtctggggcacagggaccacggtcaccgtctctgatcaggagcccaaatcttctgacaaaactcacacatccccaccgagcccagcacctgaactcctggggggaccgtcagtcttcctcttccccccaaaacccaaggacaccctcatgatctcccggacccctgaggtcacatgcgtggtggtggacgtgagccacgaagaccctgaggtcaagttcaactggtacgtggacggcgtggaggtgcataatgccaagacaaagccgcgggaggagcagtacaacagcacgtaccgtgtggtcagcgtcctcaccgtcctgcaccaggactggctgaatggcaaggagtacaagtgcaaggtctccaacaaagccctcccagcccccatcgagaaaacaatctccaaagccaaagggcagccccgagaaccacaggtgtacaccctgcccccatcccgggatgagctgaccaagaaccaggtcagcctgacctgcctggtcaaaggcttctatcccagcgacatcgccgtggagtgggagagcaatgggcagccggagaacaactacaagaccacgcctcccgtgctggactccgacggctccttcttcctctacagcaagctcaccgtggacaagagcaggtggcagcaggggaacgtcttctcatgctccgtgatgcatgaggctctgcacaaccactacacgcagaagagcctctccctgtctccgggtaagggtggcggtggctcgggcggtggtggatctgggaattctcaggtgcagctgaaggagtcaggacctggcctggtggcgccctcacagagcctgtccatcacatgcaccgtctcagggttctcattaaccggctatggtgtaaactgggttcgccagcctccaggaaagggtctggagtggctgggaatgatatggggtgatggaagcacagactataattcagctctcaaatccagactatcgatcaccaaggacaactccaagagccaagttttcttaaaaatgaacagtctgcaaactgatgacacagccagatactactgtgctcgagatggttatagtaactttcattactatgttatggactactggggtcaaggaacctcagtcaccgtctcctctgggggtggaggctctggtggcggtggatccggcggaggtgggtcgggtggcggcggatctgacattgtgctcacccaatctccagcttctttggctgtgtctctaggtcagagagccaccatctcctgcagagccagtgaaagtgttgaatattatgtcacaagtttaatgcagtggtaccaacagaaaccaggacagccacccaaactcctcatctctgctgctagcaacgtagaatctggggtccctgccaggtttagtggcagtgggtctgggacagactttagcctcaacatccatcctgtggaggaggatgatattgcaatgtatttctgtcagcaaagtaggaaggttccatggacgttcggtggaggcaccaagctggaaatcaaacgttaatctaga

SEQ ID NO: 20 - protein, 765 aa, Artificial sequence
  Synthetic polypeptide
  misc_feature: 2H7sssIgG1-H4-2e12HL (AA)
  misc_feature (1)..(22): Leader
  misc_feature (23)..(128): VL
  misc_feature (129)..(144): Linker
  misc_feature (145)..(265): VH
  misc_feature (268)..(282): Hinge
  misc_feature (500)..(512): EFD-BD2 Linker
  misc_feature (513)..(633): VH2
  misc_feature (634)..(653): Linker2
  misc_feature (654)..(765): VL2
MDFQVQIFSFLLISASVIMSRGQIVLSQSPAILSASPGEKVTMTCRASSSVSYMHWYQQKPGSSPKPWIYAPSNLASGVPARFSGSGSGTSYSLTISRVEAEDAATYYCQQWSFNPPTFGAGTKLELKDGGGSGGGGSGGGGSSQAYLQQSGAESVRPGASVKMSCKASGYTFTSYNMHWVKQTPRQGLEWIGAIYPGNGDTSYNQKFKGKATLTVDKSSSTAYMQLSSLTSEDSAVYFCARVVYYSNSYWYFDVWGTGTTVTVSDQEPKSSDKTHTSPPSPAPELLGGPSVFLFPPKPKDTLMISRTPEVTCVVVDVSHEDPEVKFNWYVDGVEVHNAKTKPREEQYNSTYRVVSVLTVLHQDWLNGKEYKCKVSNKALPAPIEKTISKAKGQPREPQVYTLPPSRDELTKNQVSLTCLVKGFYPSDIAVEWESNGQPENNYKTTPPVLDSDGSFFLYSKLTVDKSRWQQGNVFSCSVMHEALHNHYTQKSLSLSPGKGGGGSGGGGSGNSQVQLKESGPGLVAPSQSLSITCTVSGFSLTGYGVNWVRQPPGKGLEWLGMIWGDGSTDYNSALKSRLSITKDNSKSQVFLKMNSLQTDDTARYYCARDGYSNFHYYVMDYWGQGTSVTVSSGGGGSGGGGSGGGGSGGGGSDIVLTQSPASLAVSLGQRATISCRASESVEYYVTSLMQWYQQKPGQPPKLLISAASNVESGVPARFSGSGSGTDFSLNIHPVEEDDIAMYFCQQSRKVPWTFGGGTKLEIKR

SEQ ID NO: 21 - DNA, 2322 bp, Artificial sequence
  Synthetic polynucleotide
  misc_feature: 2H7sssIgG1-H5-2e12HL (w/2e12 leader) (PN)
aagcttgccgccatggattttcaagtgcagattttcagcttcctgctaatcagtgcttcagtcataatgtccagaggacaaattgttctctcccagtctccagcaatcctgtctgcatctccaggggagaaggtcacaatgacttgcagggccagctcaagtgtaagttacatgcactggtaccagcagaagccaggatcctcccccaaaccctggatttatgccccatccaacctggcttctggagtccctgctcgcttcagtggcagtgggtctgggacctcttactctctcacaatcagcagagtggaggctgaagatgctgccacttattactgccagcagtggagttttaacccacccacgttcggtgctgggaccaagctggagctgaaagatggcggtggctcgggcggtggtggatctggaggaggtgggagctctcaggcttatctacagcagtctggggctgagtcggtgaggcctggggcctcagtgaagatgtcctgcaaggcttctggctacacatttaccagttacaatatgcactgggtaaagcagacacctagacagggcctggaatggattggagctatttatccaggaaatggtgatacttcctacaatcagaagttcaagggcaaggccacactgactgtagacaaatcctccagcacagcctacatgcagctcagcagcctgacatctgaagactctgcggtctatttctgtgcaagagtggtgtactatagtaactcttactggtacttcgatgtctggggcacagggaccacggtcaccgtctctgatcaggagcccaaatcttctgacaaaactcacacatccccaccgagcccagcacctgaactcctggggggaccgtcagtcttcctcttccccccaaaacccaaggacaccctcatgatctcccggacccctgaggtcacatgcgtggtggtggacgtgagccacgaagaccctgaggtcaagttcaactggtacgtggacggcgtggaggtgcataatgccaagacaaagccgcgggaggagcagtacaacagcacgtaccgtgtggtcagcgtcctcaccgtcctgcaccaggactggctgaatggcaaggagtacaagtgcaaggtctccaacaaagccctcccagcccccatcgagaaaacaatctccaaagccaaagggcagccccgagaaccacaggtgtacaccctgcccccatcccgggatgagctgaccaagaaccaggtcagcctgacctgcctggtcaaaggcttctatcccagcgacatcgccgtggagtgggagagcaatgggcagccggagaacaactacaagaccacgcctcccgtgctggactccgacggctccttcttcctctacagcaagctcaccgtggacaagagcaggtggcagcaggggaacgtcttctcatgctccgtgatgcatgaggctctgcacaaccactacacgcagaagagcctctccctgtctccgggtaagaattatggtggcggtggctcgggcggtggtggatctgggaattctcaggtgcagctgaaggagtcaggacctggcctggtggcgccctcacagagcctgtccatcacatgcaccgtctcagggttctcattaaccggctatggtgtaaactgggttcgccagcctccaggaaagggtctggagtggctgggaatgatatggggtgatggaagcacagactataattcagctctcaaatccagactatcgatcaccaaggacaactccaagagccaagttttcttaaaaatgaacagtctgcaaactgatgacacagccagatactactgtgctcgagatggttatagtaactttcattactatgttatggactactggggtcaaggaacctcagtcaccgtctcctctgggggtggaggctctggtggcggtggatccggcggaggtgggtcgggtggcggcggatctgacattgtgctcacccaatctccagcttctttggctgtgtctctaggtcagagagccaccatctcctgcagagccagtgaaagtgttgaatattatgtcacaagtttaatgcagtggtaccaacagaaaccaggacagccacccaaactcctcatctctgctgctagcaacgtagaatctggggtccctgccaggtttagtggcagtgggtctgggacagactttagcctcaacatccatcctgtggaggaggatgatattgcaatgtatttctgtcagcaaagtaggaaggttccatggacgttcggtggaggcaccaagctggaaatcaaacgttaatctaga

SEQ ID NO: 22 - protein, 767 aa, Artificial sequence
  Synthetic polypeptide
  misc_feature: 2H7sssIgG1-H5-2e12HL (w/2e12 leader) (AA)
  misc_feature (1)..(22): Leader
  misc_feature (23)..(128): VL
  misc_feature (129)..(144): Linker
  misc_feature (145)..(265): VH
  misc_feature (268)..(282): Hinge
  misc_feature (500)..(514): EFD-BD2 Linker
  misc_feature (515)..(635): VH2
  misc_feature (636)..(655): Linker2
  misc_feature (656)..(767): VL2
MDFQVQIFSFLLISASVIMSRGQIVLSQSPAILSASPGEKVTMTCRASSSVSYMHWYQQKPGSSPKPWIYAPSNLASGVPARFSGSGSGTSYSLTISRVEAEDAATYYCQQWSFNPPTFGAGTKLELKDGGGSGGGGSGGGGSSQAYLQQSGAESVRPGASVKMSCKASGYTFTSYNMHWVKQTPRQGLEWIGAIYPGNGDTSYNQKFKGKATLTVDKSSSTAYMQLSSLTSEDSAVYFCARVVYYSNSYWYFDVWGTGTTVTVSDQEPKSSDKTHTSPPSPAPELLGGPSVFLFPPKPKDTLMISRTPEVTCVVVDVSHEDPEVKFNWYVDGVEVHNAKTKPREEQYNSTYRVVSVLTVLHQDWLNGKEYKCKVSNKALPAPIEKTISKAKGQPREPQVYTLPPSRDELTKNQVSLTCLVKGFYPSDIAVEWESNGQPENNYKTTPPVLDSDGSFFLYSKLTVDKSRWQQGNVFSCSVMHEALHNHYTQKSLSLSPGKNYGGGGSGGGGSGNSQVQLKESGPGLVAPSQSLSITCTVSGFSLTGYGVNWVRQPPGKGLEWLGMIWGDGSTDYNSALKSRLSITKDNSKSQVFLKMNSLQTDDTARYYCARDGYSNFHYYVMDYWGQGTSVTVSSGGGGSGGGGSGGGGSGGGGSDIVLTQSPASLAVSLGQRATISCRASESVEYYVTSLMQWYQQKPGQPPKLLISAASNVESGVPARFSGSGSGTDFSLNIHPVEEDDIAMYFCQQSRKVPWTFGGGTKLEIKR

SEQ ID NO: 23 - DNA, 2331 bp, Artificial sequence
  Synthetic polynucleotide
  misc_feature: 2H7sssIgG1-H6-2e12HL (w/2e12 leader) (PN)
aagcttgccgccatggattttcaagtgcagattttcagcttcctgctaatcagtgcttcagtcataatgtccagaggacaaattgttctctcccagtctccagcaatcctgtctgcatctccaggggagaaggtcacaatgacttgcagggccagctcaagtgtaagttacatgcactggtaccagcagaagccaggatcctcccccaaaccctggatttatgccccatccaacctggcttctggagtccctgctcgcttcagtggcagtgggtctgggacctcttactctctcacaatcagcagagtggaggctgaagatgctgccacttattactgccagcagtggagttttaacccacccacgttcggtgctgggaccaagctggagctgaaagatggcggtggctcgggcggtggtggatctggaggaggtgggagctctcaggcttatctacagcagtctggggctgagtcggtgaggcctggggcctcagtgaagatgtcctgcaaggcttctggctacacatttaccagttacaatatgcactgggtaaagcagacacctagacagggcctggaatggattggagctatttatccaggaaatggtgatacttcctacaatcagaagttcaagggcaaggccacactgactgtagacaaatcctccagcacagcctacatgcagctcagcagcctgacatctgaagactctgcggtctatttctgtgcaagagtggtgtactatagtaactcttactggtacttcgatgtctggggcacagggaccacggtcaccgtctctgatcaggagcccaaatcttctgacaaaactcacacatccccaccgagcccagcacctgaactcctggggggaccgtcagtcttcctcttccccccaaaacccaaggacaccctcatgatctcccggacccctgaggtcacatgcgtggtggtggacgtgagccacgaagaccctgaggtcaagttcaactggtacgtggacggcgtggaggtgcataatgccaagacaaagccgcgggaggagcagtacaacagcacgtaccgtgtggtcagcgtcctcaccgtcctgcaccaggactggctgaatggcaaggagtacaagtgcaaggtctccaacaaagccctcccagcccccatcgagaaaacaatctccaaagccaaagggcagccccgagaaccacaggtgtacaccctgcccccatcccgggatgagctgaccaagaaccaggtcagcctgacctgcctggtcaaaggcttctatcccagcgacatcgccgtggagtgggagagcaatgggcagccggagaacaactacaagaccacgcctcccgtgctggactccgacggctccttcttcctctacagcaagctcaccgtggacaagagcaggtggcagcaggggaacgtcttctcatgctccgtgatgcatgaggctctgcacaaccactacacgcagaagagcctctccctgtctccgggtaagggtggcggtggctcgggcggtggtggatctgggggaggaggcagcgggaattctcaggtgcagctgaaggagtcaggacctggcctggtggcgccctcacagagcctgtccatcacatgcaccgtctcagggttctcattaaccggctatggtgtaaactgggttcgccagcctccaggaaagggtctggagtggctgggaatgatatggggtgatggaagcacagactataattcagctctcaaatccagactatcgatcaccaaggacaactccaagagccaagttttcttaaaaatgaacagtctgcaaactgatgacacagccagatactactgtgctcgagatggttatagtaactttcattactatgttatggactactggggtcaaggaacctcagtcaccgtctcctctgggggtggaggctctggtggcggtggatccggcggaggtgggtcgggtggcggcggatctgacattgtgctcacccaatctccagcttctttggctgtgtctctaggtcagagagccaccatctcctgcagagccagtgaaagtgttgaatattatgtcacaagtttaatgcagtggtaccaacagaaaccaggacagccacccaaactcctcatctctgctgctagcaacgtagaatctggggtccctgccaggtttagtggcagtgggtctgggacagactttagcctcaacatccatcctgtggaggaggatgatattgcaatgtatttctgtcagcaaagtaggaaggttccatggacgttcggtggaggcaccaagctggaaatcaaacgttaatctaga

SEQ ID NO: 24 - protein, 770 aa, Artificial sequence
  Synthetic polypeptide
  misc_feature: 2H7sssIgG1-H6-2e12HL (w/2e12 leader) (AA)
  misc_feature (1)..(22): Leader
  misc_feature (23)..(128): VL
  misc_feature (129)..(144): Linker
  misc_feature (145)..(265): VH
  misc_feature (268)..(282): Hinge
  misc_feature (500)..(517): EFD-BD2 Linker
  misc_feature (518)..(638): VH2
  misc_feature (639)..(658): Linker2
  misc_feature (659)..(770): VL2
MDFQVQIFSFLLISASVIMSRGQIVLSQSPAILSASPGEKVTMTCRASSSVSYMHWYQQKPGSSPKPWIYAPSNLASGVPARFSGSGSGTSYSLTISRVEAEDAATYYCQQWSFNPPTFGAGTKLELKDGGGSGGGGSGGGGSSQAYLQQSGAESVRPGASVKMSCKASGYTFTSYNMHWVKQTPRQGLEWIGAIYPGNGDTSYNQKFKGKATLTVDKSSSTAYMQLSSLTSEDSAVYFCARVVYYSNSYWYFDVWGTGTTVTVSDQEPKSSDKTHTSPPSPAPELLGGPSVFLFPPKPKDTLMISRTPEVTCVVVDVSHEDPEVKFNWYVDGVEVHNAKTKPREEQYNSTYRVVSVLTVLHQDWLNGKEYKCKVSNKALPAPIEKTISKAKGQPREPQVYTLPPSRDELTKNQVSLTCLVKGFYPSDIAVEWESNGQPENNYKTTPPVLDSDGSFFLYSKLTVDKSRWQQGNVFSCSVMHEALHNHYTQKSLSLSPGKGGGGSGGGGSGGGGSGNSQVQLKESGPGLVAPSQSLSITCTVSGFSLTGYGVNWVRQPPGKGLEWLGMIWGDGSTDYNSALKSRLSITKDNSKSQVFLKMNSLQTDDTARYYCARDGYSNFHYYVMDYWGQGTSVTVSSGGGGSGGGGSGGGGSGGGGSDIVLTQSPASLAVSLGQRATISCRASESVEYYVTSLMQWYQQKPGQPPKLLISAASNVESGVPARFSGSGSGTDFSLNIHPVEEDDIAMYFCQQSRKVPWTFGGGTKLEIKR

SEQ ID NO: 25 - DNA, 2301 bp, Artificial sequence
  Synthetic polynucleotide
  misc_feature: 2H7sscIgG1-H7-2e12HL (w/2e12 linker ) (PN)
aagcttgccgccatggattttcaagtgcagattttcagcttcctgctaatcagtgcttcagtcataatgtccagaggacaaattgttctctcccagtctccagcaatcctgtctgcatctccaggggagaaggtcacaatgacttgcagggccagctcaagtgtaagttacatgcactggtaccagcagaagccaggatcctcccccaaaccctggatttatgccccatccaacctggcttctggagtccctgctcgcttcagtggcagtgggtctgggacctcttactctctcacaatcagcagagtggaggctgaagatgctgccacttattactgccagcagtggagttttaacccacccacgttcggtgctgggaccaagctggagctgaaagatggcggtggctcgggcggtggtggatctggaggaggtgggagctctcaggcttatctacagcagtctggggctgagtcggtgaggcctggggcctcagtgaagatgtcctgcaaggcttctggctacacatttaccagttacaatatgcactgggtaaagcagacacctagacagggcctggaatggattggagctatttatccaggaaatggtgatacttcctacaatcagaagttcaagggcaaggccacactgactgtagacaaatcctccagcacagcctacatgcagctcagcagcctgacatctgaagactctgcggtctatttctgtgcaagagtggtgtactatagtaactcttactggtacttcgatgtctggggcacagggaccacggtcaccgtctctgatcaggagcccaaatcttctgacaaaactcacacatccccaccgtgcccagcacctgaactcctggggggatcgtcagtcttcctcttccccccaaaacccaaggacaccctcatgatctcccggacccctgaggtcacatgcgtggtggtggacgtgagccacgaagaccctgaggtcaagttcaactggtacgtggacggcgtggaggtgcataatgccaagacaaagccgcgggaggagcagtacaacagcacgtaccgtgtggtcagcgtcctcaccgtcctgcaccaggactggctgaatggcaaggagtacaagtgcaaggtctccaacaaagccctcccagcccccatcgagaaaaccatctccaaagccaaagggcagccccgagaaccacaggtgtacaccctgcccccatcccgggatgagctgaccaagaaccaggtcagcctgacctgcctggtcaaaggcttctatccaagcgacatcgccgtggagtgggagagcaatgggcagccggagaacaactacaagaccacgcctcccgtgctggactccgacggctccttcttcctctacagcaagctcaccgtggacaagagcaggtggcagcaggggaacgtcttctcatgctccgtgatgcatgaggctctgcacaaccactacacgcagaagagcctctccctgtctccgggtaaggggtgtccaccttgtccgaattctcaggtgcagctgaaggagtcagggcctggcagcgtggcgccctcacagagcctgtccatcacatgcaccgtctcagggttctcattaaccggctatggtgtaaactgggttcgccagcctccaggaaagggtctggagtggctgggaatgatatggggtgatggaagcacagactataattcagctctcaaatccagactatcgatcaccaaggacaactccaagagccaagttttcttaaaaatgaacagtctgcaaactgatgacacagccagatactactgtgctcgagatggttatagtaactttcattactatgttatggactactggggtcaaggaacctcagtcaccgtctcctctgggggtggaggctctggtggcggtggatccggcggaggtgggtcgggtggcggcggatctgacattgtgctcacccaatctccagcttctttggctgtgtctctaggtcagagagccaccatctcctgcagagccagtgaaagtgttgaatattatgtcacaagtttaatgcagtggtaccaacagaaaccaggacagccacccaagctcctcatctctgctgctagcaacgtagaatctggggtccctgccaggtttagtggcagtgggtctgggacagactttagcctcaacatccatcctgtggaggaggatgatattgcaatgtatttctgtcagcaaagtaggaaggttccatggacgttcggtggaggcaccaagctggaaatcaaacgttaatctaga

SEQ ID NO: 26 - protein, 760 aa, Artificial sequence
  Synthetic polypeptide
  misc_feature: 2H7sscIgG1-H7-2e12HL (w/2e12 linker ) (AA)
  misc_feature (1)..(22): Leader
  misc_feature (23)..(128): VL
  misc_feature (129)..(144): Linker
  misc_feature (145)..(265): VH
  misc_feature (268)..(282): Hinge
  misc_feature (500)..(507): EFD-BD2 Linker
  misc_feature (508)..(628): VH2
  misc_feature (629)..(648): Linker2
  misc_feature (649)..(760): VL2
MDFQVQIFSFLLISASVIMSRGQIVLSQSPAILSASPGEKVTMTCRASSSVSYMHWYQQKPGSSPKPWIYAPSNLASGVPARFSGSGSGTSYSLTISRVEAEDAATYYCQQWSFNPPTFGAGTKLELKDGGGSGGGGSGGGGSSQAYLQQSGAESVRPGASVKMSCKASGYTFTSYNMHWVKQTPRQGLEWIGAIYPGNGDTSYNQKFKGKATLTVDKSSSTAYMQLSSLTSEDSAVYFCARVVYYSNSYWYFDVWGTGTTVTVSDQEPKSSDKTHTSPPCPAPELLGGSSVFLFPPKPKDTLMISRTPEVTCVVVDVSHEDPEVKFNWYVDGVEVHNAKTKPREEQYNSTYRVVSVLTVLHQDWLNGKEYKCKVSNKALPAPIEKTISKAKGQPREPQVYTLPPSRDELTKNQVSLTCLVKGFYPSDIAVEWESNGQPENNYKTTPPVLDSDGSFFLYSKLTVDKSRWQQGNVFSCSVMHEALHNHYTQKSLSLSPGKGCPPCPNSQVQLKESGPGSVAPSQSLSITCTVSGFSLTGYGVNWVRQPPGKGLEWLGMIWGDGSTDYNSALKSRLSITKDNSKSQVFLKMNSLQTDDTARYYCARDGYSNFHYYVMDYWGQGTSVTVSSGGGGSGGGGSGGGGSGGGGSDIVLTQSPASLAVSLGQRATISCRASESVEYYVTSLMQWYQQKPGQPPKLLISAASNVESGVPARFSGSGSGTDFSLNIHPVEEDDIAMYFCQQSRKVPWTFGGGTKLEIKR

SEQ ID NO: 27 - DNA, 2283 bp, Artificial sequence
  Synthetic polynucleotide
  misc_feature: 2H7sssIgG1-H7-G194 HL (w/2e12 leader) (PN)
aagcttgccgccatggattttcaagtgcagattttcagcttcctgctaatcagtgcttcagtcataatgtccagaggacaaattgttctctcccagtctccagcaatcctgtctgcatctccaggggagaaggtcacaatgacttgcagggccagctcaagtgtaagttacatgcactggtaccagcagaagccaggatcctcccccaaaccctggatttatgccccatccaacctggcttctggagtccctgctcgcttcagtggcagtgggtctgggacctcttactctctcacaatcagcagagtggaggctgaagatgctgccacttattactgccagcagtggagttttaacccacccacgttcggtgctgggaccaagctggagctgaaagatggcggtggctcgggcggtggtggatctggaggaggtgggagctctcaggcttatctacagcagtctggggctgagtcggtgaggcctggggcctcagtgaagatgtcctgcaaggcttctggctacacatttaccagttacaatatgcactgggtaaagcagacacctagacagggcctggaatggattggagctatttatccaggaaatggtgatacttcctacaatcagaagttcaagggcaaggccacactgactgtagacaaatcctccagcacagcctacatgcagctcagcagcctgacatctgaagactctgcggtctatttctgtgcaagagtggtgtactatagtaactcttactggtacttcgatgtctggggcacagggaccacggtcaccgtctctgatcaggagcccaaatcttctgacaaaactcacacatccccaccgtgcccagcacctgaactcctggggggatcgtcagtcttcctcttccccccaaaacccaaggacaccctcatgatctcccggacccctgaggtcacatgcgtggtggtggacgtgagccacgaagaccctgaggtcaagttcaactggtacgtggacggcgtggaggtgcataatgccaagacaaagccgcgggaggagcagtacaacagcacgtaccgtgtggtcagcgtcctcaccgtcctgcaccaggactggctgaatggcaaggagtacaagtgcaaggtctccaacaaagccctcccagcccccatcgagaaaaccatctccaaagccaaagggcagccccgagaaccacaggtgtacaccctgcccccatcccgggatgagctgaccaagaaccaggtcagcctgacctgcctggtcaaaggcttctatccaagcgacatcgccgtggagtgggagagcaatgggcagccggagaacaactacaagaccacgcctcccgtgctggactccgacggctccttcttcctctacagcaagctcaccgtggacaagagcaggtggcagcaggggaacgtcttctcatgctccgtgatgcatgaggctctgcacaaccactacacgcagaagagcctctccctgtctccgggtaaggggtgtccaccttgtccgaattctgaggtccagctgcaacagtctggacctgaactggtgaagcctggagcttcaatgaagatttcctgcaaggcctctggttactcattcactggctacatcgtgaactggctgaagcagagccatggaaagaaccttgagtggattggacttattaatccatacaaaggtcttactacctacaaccagaaattcaagggcaaggccacattaactgtagacaagtcatccagcacagcctacatggagctcctcagtctgacatctgaagactctgcagtctattactgtgcaagatctgggtactatggtgactcggactggtacttcgatgtctggggcgcagggaccacggtcaccgtctcctctggtggcggtggctcgggcggtggtggatctggaggaggtgggagcgctagcgacatccagatgacacagactacatcctccctgtctgcctctctgggagacagagtcaccatcagttgcagggcaagtcaggacattcgcaattatttaaactggtatcagcagaaaccagatggaactgttaaactcctgatctactacacatcaagattacactcaggagtcccatcaaggttcagtggcagtgggtctggaacagattattctctcaccattgccaacctgcaaccagaagatattgccacttacttttgccaacagggtaatacgcttccgtggacgttcggtggaggcaccaaactggtaaccaaacggtaatctaga

SEQ ID NO: 28 - protein, 754 aa, Artificial sequence
  Synthetic polypeptide
  misc_feature: 2H7sssIgG1-H7-G194 HL (w/2e12 leader) (AA)
  misc_feature (1)..(22): Leader
  misc_feature (23)..(128): VL
  misc_feature (129)..(144): Linker
  misc_feature (145)..(265): VH1
  misc_feature (268)..(282): Hinge
  misc_feature (500)..(507): EFD-BD2 Linker
  misc_feature (508)..(629): VH2
  misc_feature (630)..(646): Linker2
  misc_feature (647)..(754): VL2
MDFQVQIFSFLLISASVIMSRGQIVLSQSPAILSASPGEKVTMTCRASSSVSYMHWYQQKPGSSPKPWIYAPSNLASGVPARFSGSGSGTSYSLTISRVEAEDAATYYCQQWSFNPPTFGAGTKLELKDGGGSGGGGSGGGGSSQAYLQQSGAESVRPGASVKMSCKASGYTFTSYNMHWVKQTPRQGLEWIGAIYPGNGDTSYNQKFKGKATLTVDKSSSTAYMQLSSLTSEDSAVYFCARVVYYSNSYWYFDVWGTGTTVTVSDQEPKSSDKTHTSPPCPAPELLGGSSVFLFPPKPKDTLMISRTPEVTCVVVDVSHEDPEVKFNWYVDGVEVHNAKTKPREEQYNSTYRVVSVLTVLHQDWLNGKEYKCKVSNKALPAPIEKTISKAKGQPREPQVYTLPPSRDELTKNQVSLTCLVKGFYPSDIAVEWESNGQPENNYKTTPPVLDSDGSFFLYSKLTVDKSRWQQGNVFSCSVMHEALHNHYTQKSLSLSPGKGCPPCPNSEVQLQQSGPELVKPGASMKISCKASGYSFTGYIVNWLKQSHGKNLEWIGLINPYKGLTTYNQKFKGKATLTVDKSSSTAYMELLSLTSEDSAVYYCARSGYYGDSDWYFDVWGAGTTVTVSSGGGGSGGGGSGGGGSASDIQMTQTTSSLSASLGDRVTISCRASQDIRNYLNWYQQKPDGTVKLLIYYTSRLHSGVPSRFSGSGSGTDYSLTIANLQPEDIATYFCQQGNTLPWTFGGGTKLVTKR

SEQ ID NO: 29 - DNA, 2298 bp, Artificial sequence
  Synthetic polynucleotide
  misc_feature: 2H7sssIgG1-H7-G281 HL (w/2e12 leader) (PN)
aagcttgccgccatggattttcaagtgcagattttcagcttcctgctaatcagtgcttcagtcataatgtccagaggacaaattgttctctcccagtctccagcaatcctgtctgcatctccaggggagaaggtcacaatgacttgcagggccagctcaagtgtaagttacatgcactggtaccagcagaagccaggatcctcccccaaaccctggatttatgccccatccaacctggcttctggagtccctgctcgcttcagtggcagtgggtctgggacctcttactctctcacaatcagcagagtggaggctgaagatgctgccacttattactgccagcagtggagttttaacccacccacgttcggtgctgggaccaagctggagctgaaagatggcggtggctcgggcggtggtggatctggaggaggtgggagctctcaggcttatctacagcagtctggggctgagtcggtgaggcctggggcctcagtgaagatgtcctgcaaggcttctggctacacatttaccagttacaatatgcactgggtaaagcagacacctagacagggcctggaatggattggagctatttatccaggaaatggtgatacttcctacaatcagaagttcaagggcaaggccacactgactgtagacaaatcctccagcacagcctacatgcagctcagcagcctgacatctgaagactctgcggtctatttctgtgcaagagtggtgtactatagtaactcttactggtacttcgatgtctggggcacagggaccacggtcaccgtctctgatcaggagcccaaatcttctgacaaaactcacacatccccaccgtgcccagcacctgaactcctggggggatcgtcagtcttcctcttccccccaaaacccaaggacaccctcatgatctcccggacccctgaggtcacatgcgtggtggtggacgtgagccacgaagaccctgaggtcaagttcaactggtacgtggacggcgtggaggtgcataatgccaagacaaagccgcgggaggagcagtacaacagcacgtaccgtgtggtcagcgtcctcaccgtcctgcaccaggactggctgaatggcaaggagtacaagtgcaaggtctccaacaaagccctcccagcccccatcgagaaaaccatctccaaagccaaagggcagccccgagaaccacaggtgtacaccctgcccccatcccgggatgagctgaccaagaaccaggtcagcctgacctgcctggtcaaaggcttctatccaagcgacatcgccgtggagtgggagagcaatgggcagccggagaacaactacaagaccacgcctcccgtgctggactccgacggctccttcttcctctacagcaagctcaccgtggacaagagcaggtggcagcaggggaacgtcttctcatgctccgtgatgcatgaggctctgcacaaccactacacgcagaagagcctctccctgtctccgggtaaggggtgtccaccttgtccgaattctgaggtccagctgcaacagtctggacctgaactggtgaagcctggagcttcaatgaagatttcctgcaaggcctctggttactcattcactggctacatcgtgaactggctgaagcagagccatggaaagaaccttgagtggattggacttattaatccatacaaaggtcttactacctacaaccagaaattcaagggcaaggccacattaactgtagacaagtcatccagcacagcctacatggagctcctcagtctgacatctgaagactctgcagtctattactgtgcaagatctgggtactatggtgactcggactggtacttcgatgtctggggcgcagggaccacggtcaccgtctcctctggtggcggtggctcgggcggtggtggatctggaggaggtgggagcgggggaggtggcagtgctagcgacatccagatgacacagactacatcctccctgtctgcctctctgggagacagagtcaccatcagttgcagggcaagtcaggacattcgcaattatttaaactggtatcagcagaaaccagatggaactgttaaactcctgatctactacacatcaagattacactcaggagtcccatcaaggttcagtggcagtgggtctggaacagattattctctcaccattgccaacctgcaaccagaagatattgccacttacttttgccaacagggtaatacgcttccgtggacgttcggtggaggcaccaaactggtaaccaaacggtaatctaga

SEQ ID NO: 30 - protein, 759 aa, Artificial sequence
  Synthetic polypeptide
  misc_feature: 2H7sssIgG1-H7-G281 HL (w/2e12 leader) (AA)
  misc_feature (1)..(22): Leader
  misc_feature (23)..(128): VL1
  misc_feature (129)..(144): Linker
  misc_feature (145)..(265): VH1
  misc_feature (268)..(282): Hinge
  misc_feature (500)..(507): EFD-BD2 Linker
  misc_feature (508)..(629): VH2
  misc_feature (630)..(651): Linker2
  misc_feature (652)..(759): VL2
MDFQVQIFSFLLISASVIMSRGQIVLSQSPAILSASPGEKVTMTCRASSSVSYMHWYQQKPGSSPKPWIYAPSNLASGVPARFSGSGSGTSYSLTISRVEAEDAATYYCQQWSFNPPTFGAGTKLELKDGGGSGGGGSGGGGSSQAYLQQSGAESVRPGASVKMSCKASGYTFTSYNMHWVKQTPRQGLEWIGAIYPGNGDTSYNQKFKGKATLTVDKSSSTAYMQLSSLTSEDSAVYFCARVVYYSNSYWYFDVWGTGTTVTVSDQEPKSSDKTHTSPPCPAPELLGGSSVFLFPPKPKDTLMISRTPEVTCVVVDVSHEDPEVKFNWYVDGVEVHNAKTKPREEQYNSTYRVVSVLTVLHQDWLNGKEYKCKVSNKALPAPIEKTISKAKGQPREPQVYTLPPSRDELTKNQVSLTCLVKGFYPSDIAVEWESNGQPENNYKTTPPVLDSDGSFFLYSKLTVDKSRWQQGNVFSCSVMHEALHNHYTQKSLSLSPGKGCPPCPNSEVQLQQSGPELVKPGASMKISCKASGYSFTGYIVNWLKQSHGKNLEWIGLINPYKGLTTYNQKFKGKATLTVDKSSSTAYMELLSLTSEDSAVYYCARSGYYGDSDWYFDVWGAGTTVTVSSGGGGSGGGGSGGGGSGGGGSASDIQMTQTTSSLSASLGDRVTISCRASQDIRNYLNWYQQKPDGTVKLLIYYTSRLHSGVPSRFSGSGSGTDYSLTIANLQPEDIATYFCQQGNTLPWTFGGGTKLVTKR

SEQ ID NO: 31 - DNA, 1533 bp, Artificial sequence
  Synthetic polynucleotide
  misc_feature: 2e12-sss-IgG1 HL SMIP (PN)
atggattttcaagtgcagattttcagcttcctgctaatcagtgcttcagtcataatgtccagaggagtccaggtgcagctgaaggagtcaggacctggcctggtggcgccctcacagagcctgtccatcacatgcaccgtctcagggttctcattaaccggctatggtgtaaactgggttcgccagcctccaggaaagggtctagagtggctgggaatgatatggggtgatggaagcacagactataattcagctctcaaatccagactatcgatcaccaaggacaactccaagagccaagttttcttaaaaatgaacagtctgcaaactgatgacacagccagatactactgtgctcgagatggttatagtaactttcattactatgttatggactactggggtcaaggaacctcagtcaccgtctcctctgggggtggaggctctggtggcggtggatccggcggaggtgggtcgggtggcggcggatctgacattgtgctcacccaatctccagcttctttggctgtgtctctaggtcagagagccaccatctcctgcagagccagtgaaagtgttgaatattatgtcacaagtttaatgcagtggtaccaacagaaaccaggacagccacccaaactcctcatctctgctgctagcaacgtagaatctggggtccctgccaggtttagtggcagtgggtctgggacagactttagcctcaacatccatcctgtggaggaggatgatattgcaatgtatttctgtcagcaaagtaggaaggttccatggacgttcggtggaggcaccaagctggaaatcaaacgtgatcaggagcccaaatcttctgacaaaactcacacatccccaccgtccccagcacctgaactcctggggggatcgtcagtcttcctcttccccccaaaacccaaggacaccctcatgatctcccggacccctgaggtcacatgcgtggtggtggacgtgagccacgaagaccctgaggtcaagttcaactggtacgtggacggcgtggaggtgcataatgccaagacaaagccgcgggaggagcagtacaacagcacgtaccgtgtggtcagcgtcctcaccgtcctgcaccaggactggctgaatggcaaggagtacaagtgcaaggtctccaacaaagccctcccagcctccatcgagaaaacaatctccaaagccaaagggcagccccgagaaccacaggtgtacaccctgcccccatcccgggatgagctgaccaagaaccaggtcagcctgacctgcctggtcaaaggcttctatcccagcgacatcgccgtggagtgggagagcaatgggcagccggagaacaactacaagaccacgcctcccgtgctggactccgacggctccttcttcctctacagcaagctcaccgtggacaagagcaggtggcagcaggggaacgtcttctcatgctccgtgatgcatgaggctctgcacaaccactacacgcagaagagcctctccctgtctccgggtaaatga

SEQ ID NO: 32 - protein, 510 aa, Artificial sequence
  Synthetic polypeptide
  misc_feature: 2e12-sss-IgG1 HL SMIP (AA)
  misc_feature (1)..(22): Leader
  misc_feature (24)..(144): VH
  misc_feature (145)..(164): Linker
  misc_feature (165)..(276): VL
  misc_feature (279)..(293): Hinge
MDFQVQIFSFLLISASVIMSRGVQVQLKESGPGLVAPSQSLSITCTVSGFSLTGYGVNWVRQPPGKGLEWLGMIWGDGSTDYNSALKSRLSITKDNSKSQVFLKMNSLQTDDTARYYCARDGYSNFHYYVMDYWGQGTSVTVSSGGGGSGGGGSGGGGSGGGGSDIVLTQSPASLAVSLGQRATISCRASESVEYYVTSLMQWYQQKPGQPPKLLISAASNVESGVPARFSGSGSGTDFSLNIHPVEEDDIAMYFCQQSRKVPWTFGGGTKLEIKRDQEPKSSDKTHTSPPSPAPELLGGSSVFLFPPKPKDTLMISRTPEVTCVVVDVSHEDPEVKFNWYVDGVEVHNAKTKPREEQYNSTYRVVSVLTVLHQDWLNGKEYKCKVSNKALPASIEKTISKAKGQPREPQVYTLPPSRDELTKNQVSLTCLVKGFYPSDIAVEWESNGQPENNYKTTPPVLDSDGSFFLYSKLTVDKSRWQQGNVFSCSVMHEALHNHYTQKSLSLSPGK

SEQ ID NO: 33 - DNA, 1518 bp, Artificial sequence
  Synthetic polynucleotide
  misc_feature: 2e12-sss-IgG1 LH SMIP (PN)
atggattttcaagtgcagattttcagcttcctgctaatcagtgcttcagtcataatgtccagaggagtcgacattgtgctcacccaatctccagcttctttggctgtgtctctaggtcagagagccaccatctcctgcagagccagtgaaagtgttgaatattatgtcacaagtttaatgcagtggtaccaacagaaaccaggacagccacccaaactcctcatctctgctgctagcaacgtagaatctggggtccctgccaggtttagtggcagtgggtctgggacagactttagcctcaacatccatcctgtggaggaggatgatattgcaatgtatttctgtcagcaaagtaggaaggttccatggacgttcggtggaggcaccaagctggaaatcaaacggggtggcggtggatccggcggaggtgggtcgggtggcggcggatctcaggtgcagctgaaggagtcaggacctggcctggtggcgccctcacagagcctgtccatcacatgcaccgtctcagggttctcattaaccggctatggtgtaaactgggttcgccagcctccaggaaagggtctagagtggctgggaatgatatggggtgatggaagcacagactataattcagctctcaaatccagactatcgatcaccaaggacaactccaagagccaagttttcttaaaaatgaacagtctgcaaactgatgacacagccagatactactgtgctcgagatggttatagtaactttcattactatgttatggactactggggtcaaggaacctcagtcaccgtctcctctgatcaggagcccaaatcttctgacaaaactcacacatccccaccgtccccagcacctgaactcctggggggaccgtcagtcttcctcttccccccaaaacccaaggacaccctcatgatctcccggacccctgaggtcacatgcgtggtggtggacgtgagccacgaagaccctgaggtcaagttcaactggtacgtggacggcgtggaggtgcataatgccaagacaaagccgcgggaggagcagtacaacagcacgtaccgtgtggtcagcgtcctcaccgtcctgcaccaggactggctgaatggcaaggagtacaagtgcaaggtctccaacaaagccctcccagcccccatcgagaaaacaatctccaaagccaaagggcagccccgagaaccacaggtgtacaccctgcccccatcccgggatgagctgaccaagaaccaggtcagcctgacctgcctggtcaaaggcttctatcccagcgacatcgccgtggagtgggagagcaatgggcagccggagaacaactacaagaccacgcctcccgtgctggactccgacggctccttcttcctctacagcaagctcaccgtggacaagagcaggtggcagcaggggaacgtcttctcatgctccgtgatgcatgaggctctgcacaaccactacacgcagaagagcctctccctgtctccgggtaaatga

SEQ ID NO: 34 - protein, 505 aa, Artificial sequence
  Synthetic polypeptide
  misc_feature: 2e12-sss-IgG1 LH SMIP (AA)
  misc_feature (1)..(23): Leader
  misc_feature (24)..(135): VL
  misc_feature (136)..(150): Linker
  misc_feature (151)..(271): VH
  misc_feature (274)..(288): Hinge
MDFQVQIFSFLLISASVIMSRGVDIVLTQSPASLAVSLGQRATISCRASESVEYYVTSLMQWYQQKPGQPPKLLISAASNVESGVPARFSGSGSGTDFSLNIHPVEEDDIAMYFCQQSRKVPWTFGGGTKLEIKRGGGGSGGGGSGGGGSQVQLKESGPGLVAPSQSLSITCTVSGFSLTGYGVNWVRQPPGKGLEWLGMIWGDGSTDYNSALKSRLSITKDNSKSQVFLKMNSLQTDDTARYYCARDGYSNFHYYVMDYWGQGTSVTVSSDQEPKSSDKTHTSPPSPAPELLGGPSVFLFPPKPKDTLMISRTPEVTCVVVDVSHEDPEVKFNWYVDGVEVHNAKTKPREEQYNSTYRVVSVLTVLHQDWLNGKEYKCKVSNKALPAPIEKTISKAKGQPREPQVYTLPPSRDELTKNQVSLTCLVKGFYPSDIAVEWESNGQPENNYKTTPPVLDSDGSFFLYSKLTVDKSRWQQGNVFSCSVMHEALHNHYTQKSLSLSPGK

SEQ ID NO: 35 - DNA, 1498 bp, Artificial sequence
  Synthetic polynucleotide
  misc_feature: G28-1 LH SMIP (PN)
aagcttgccgccatggaagcaccagcgcagcttctcttcctcctgctactctggctcccagataccaccggtgacatccagatgactcagtctccagcctccctatctgcatctgtgggagagactgtcaccatcacatgtcgaacaagtgaaaatgtttacagttatttggcttggtatcagcagaaacagggaaaatctcctcagctcctggtctcttttgcaaaaaccttagcagaaggtgtgccatcaaggttcagtggcagtggatcaggcacacagttttctctgaagatcagcagcctgcagcctgaagattctggaagttatttctgtcaacatcattccgataatccgtggacgttcggtggaggcaccgaactggagatcaaaggtggcggtggctcgggcggtggtgggtcgggtggcggcggatctgctagcgcagtccagctgcagcagtctggacctgagctggaaaagcctggcgcttcagtgaagatttcctgcaaggcttctggttactcattcactggctacaatatgaactgggtgaagcagaataatggaaagagccttgagtggattggaaatattgatccttattatggtggtactacctacaaccggaagttcaagggcaaggccacattgactgtagacaaatcctccagcacagcctacatgcagctcaagagtctgacatctgaggactctgcagtctattactgtgcaagatcggtcggccctatggactactggggtcaaggaacctcagtcaccgtctcgagcgagcccaaatcttctgacaaaactcacacatgcccaccgtgcccagcacctgaactcctgggtggaccgtcagtcttcctcttccccccaaaacccaaggacaccctcatgatctcccggacccctgaggtcacatgcgtggtggtggacgtgagccacgaagaccctgaggtcaagttcaactggtacgtggacggcgtggaggtgcataatgccaagacaaagccgcgggaggagcagtacaacagcacgtaccgtgtggtcagcgtcctcaccgtcctgcaccaggactggctgaatggcaaggagtacaagtgcaaggtctccaacaaagccctcccagcccccatcgagaaaaccatctccaaagccaaagggcagccccgagaaccacaggtgtacaccctgcccccatcccgggatgagctgaccaagaaccaggtcagcctgacctgcctggtcaaaggcttctatccaagcgacatcgccgtggagtgggagagcaatgggcagccggagaacaactacaagaccacgcctcccgtgctggactccgacggctccttcttcctctacagcaagctcaccgtggacaagagcaggtggcagcaggggaacgtcttctcatgctccgtgatgcatgaggctctgcacaaccactacacgcagaagagcctctccctgtctccgggtaagtgactctaga

SEQ ID NO: 36 - protein, 492 aa, Artificial sequence
  Synthetic polypeptide
  misc_feature: G28-1 LH SMIP (AA)
  misc_feature (1)..(20): Leader
  misc_feature (21)..(127): VL
  misc_feature (128)..(144): Linker
  misc_feature (145)..(260): VH
  misc_feature (261)..(275): Hinge
MEAPAQLLFLLLLWLPDTTGDIQMTQSPASLSASVGETVTITCRTSENVYSYLAWYQQKQGKSPQLLVSFAKTLAEGVPSRFSGSGSGTQFSLKISSLQPEDSGSYFCQHHSDNPWTFGGGTELEIKGGGGSGGGGSGGGGSASAVQLQQSGPELEKPGASVKISCKASGYSFTGYNMNWVKQNNGKSLEWIGNIDPYYGGTTYNRKFKGKATLTVDKSSSTAYMQLKSLTSEDSAVYYCARSVGPMDYWGQGTSVTVSSEPKSSDKTHTCPPCPAPELLGGPSVFLFPPKPKDTLMISRTPEVTCVVVDVSHEDPEVKFNWYVDGVEVHNAKTKPREEQYNSTYRVVSVLTVLHQDWLNGKEYKCKVSNKALPAPIEKTISKAKGQPREPQVYTLPPSRDELTKNQVSLTCLVKGFYPSDIAVEWESNGQPENNYKTTPPVLDSDGSFFLYSKLTVDKSRWQQGNVFSCSVMHEALHNHYTQKSLSLSPGK

SEQ ID NO: 37 - DNA, 1522 bp, Artificial sequence
  Synthetic polynucleotide
  misc_feature: G28-1 HL SMIP (PN)
aagcttgccgccatggaagcaccagcgcagcttctcttcctcctgctactctggctcccagataccaccggtgcggtccagctgcagcagtctggacctgagtcggaaaagcctggcgcttcagtgaagatttcctgcaaggcttctggttactcattcactggctacaatatgaactgggtgaagcagaataatggaaagagccttgagtggattggaaatattgatccttattatggtggtactacctacaaccggaagttcaagggcaaggccacattgactgtagacaaatcctccggcacagcctacatgcagctcaagagtctgacatctgaggactctgcagtctattactgtgcaagatcggtcggccctatggactactggggtcaaggaacctcagtcaccgtctcttctggtggcggtggctcgggcggtggtgggtcgggtggcggcggatcaggaggaggcgggagtgctagcgacatccagatgactcagtctccagcctccctatctgcatctgtgggagagactgtcaccatcacatgtcgaacaagtgaaaatgtttacagttatttggcttggtatcagcagaaacagggaaaatctcctcagctcctggtctcttttgcaaaaaccttagcagaaggtgtgccatcaaggttcagtggcagtggatcaggcacacagttttctctgaagatcagcagcctgcagcctgaagattctggaagttatttctgtcaacatcattccgataatccgtggacgttcggtggaggcaccgaactggagatcaaaggctcgagcgagcccaaatcttctgacaaaactcacacatgcccaccgtgcccagcacctgaactcctgggtggaccgtcagtcttcctcttccccccaaaacccaaggacaccctcatgatctcccggacccctgaggtcacatgcgtggtggtggacgtgagccacgaagaccctgaggtcaagttcaactggtacgtggacggcgtggaggtgcataatgccaagacaaagccgcgggaggagcagtacaacagcacgtaccgtgtggtcagcgtcctcaccgtcctgcaccaggactggctgaatggcaaggagtacaagtgcaaggtctccaacaaagccctcccagcccccatcgagaaaaccatctccaaagccaaagggcagccccgagaaccacaggtgtacaccctgcccccatcccgggatgagctgaccaagaaccaggtcagcctgacctgcctggtcaaaggcttctatccaagcgacatcgccgtggagtgggagagcaatgggcagccggagaacaactacaagaccacgcctcccgtgctggactccgacggctccttcttcctctacagcaagctcaccgtggacaagagcaggtggcagcaggggaacgtcttctcatgctccgtgatgcatgaggctctgcacaaccactacacgcagaagagcctctccctgtctccgggtaagtgactctaga

SEQ ID NO: 38 - protein, 500 aa, Artificial sequence
  Synthetic polypeptide
  misc_feature: G28-1 HL SMIP (AA)
  misc_feature (1)..(20): Leader
  misc_feature (21)..(136): VH
  misc_feature (137)..(158): Linker
  misc_feature (159)..(266): VL
  misc_feature (268)..(283): Hinge
MEAPAQLLFLLLLWLPDTTGAVQLQQSGPESEKPGASVKISCKASGYSFTGYNMNWVKQNNGKSLEWIGNIDPYYGGTTYNRKFKGKATLTVDKSSGTAYMQLKSLTSEDSAVYYCARSVGPMDYWGQGTSVTVSSGGGGSGGGGSGGGGSGGGGSASDIQMTQSPASLSASVGETVTITCRTSENVYSYLAWYQQKQGKSPQLLVSFAKTLAEGVPSRFSGSGSGTQFSLKISSLQPEDSGSYFCQHHSDNPWTFGGGTELEIKGSSEPKSSDKTHTCPPCPAPELLGGPSVFLFPPKPKDTLMISRTPEVTCVVVDVSHEDPEVKFNWYVDGVEVHNAKTKPREEQYNSTYRVVSVLTVLHQDWLNGKEYKCKVSNKALPAPIEKTISKAKGQPREPQVYTLPPSRDELTKNQVSLTCLVKGFYPSDIAVEWESNGQPENNYKTTPPVLDSDGSFFLYSKLTVDKSRWQQGNVFSCSVMHEALHNHYTQKSLSLSPGK

SEQ ID NO: 39 - DNA, 1522 bp, Artificial sequence
  Synthetic polynucleotide
  misc_feature: G19-4 LH SMIP (PN)
aagcttgccgccatggaagcaccagcgcagcttctcttcctcctgctactctggctcccagataccaccggtgacatccagatgacacagactacatcctccctgtctgcctctctgggagacagagtcaccatcagttgcagggcaagtcaggacattcgcaattatttaaactggtatcagcagaaaccagatggaactgttaaactcctgatctactacacatcaagattacactcaggagtcccatcaaggttcagtggcagtgggtctggaacagattattctctcaccattgccaacctgcaaccagaagatattgccacttacttttgccaacagggtaatacgcttccgtggacgttcggtggaggcaccaaactggtaaccaaacggggtggcggtggctcgggcggtggtggatctggaggaggtgggagcgctagcgaggtccagctgcaacagtctggacctgaactggtgaagcctggagcttcaatgaagatttcctgcaaggcctctggttactcattcactggctacatcgtgaactggctgaagcagagccatggaaagaaccttgagtggattggacttattaatccatacaaaggtcttactacctacaaccagaaattcaagggcaaggccacattaactgtagacaagtcatccagcacagcctacatggagctcctcagtctgacatctgaagactctgcagtctattactgtgcaagatctgggtactatggtgactcggactggtacttcgatgtctggggcgcagggaccacggtcaccgtctcctcgagcgagcccaaatcttctgacaaaactcacacatgcccaccgtgcccagcacctgaactcctgggtggaccgtcagtcttcctcttccccccaaaacccaaggacaccctcatgatctcccggacccctgaggtcacatgcgtggtggtggacgtgagccacgaagaccctgaggtcaagttcaactggtacgtggacggcgtggaggtgcataatgccaagacaaagccgcgggaggagcagtacaacagcacgtaccgtgtggtcagcgtcctcaccgtcctgcaccaggactggctgaatggcaaggagtacaagtgcaaggtctccaacaaagccctcccagcccccatcgagaaaaccatctccaaagccaaagggcagccccgagaaccacaggtgtacaccctgcccccatcccgggatgagctgaccaagaaccaggtcagcctgacctgcctggtcaaaggcttctatccaagcgacatcgccgtggagtgggagagcaatgggcagccggagaacaactacaagaccacgcctcccgtgctggactccgacggctccttcttcctctacagcaagctcaccgtggacaagagcaggtggcagcaggggaacgtcttctcatgctccgtgatgcatgaggctctgcacaaccactacacgcagaagagcctctccctgtctccgggtaagtgactctaga

SEQ ID NO: 40 - protein, 499 aa, Artificial sequence
  Synthetic polypeptide
  misc_feature: G19-4 LH SMIP (AA)
  misc_feature (1)..(20): Leader
  misc_feature (21)..(128): VL
  misc_feature (129)..(145): Linker
  misc_feature (146)..(267): VH
  misc_feature (268)..(282): Hinge
MEAPAQLLFLLLLWLPDTTGDIQMTQTTSSLSASLGDRVTISCRASQDIRNYLNWYQQKPDGTVKLLIYYTSRLHSGVPSRFSGSGSGTDYSLTIANLQPEDIATYFCQQGNTLPWTFGGGTKLVTKRGGGGSGGGGSGGGGSASEVQLQQSGPELVKPGASMKISCKASGYSFTGYIVNWLKQSHGKNLEWIGLINPYKGLTTYNQKFKGKATLTVDKSSSTAYMELLSLTSEDSAVYYCARSGYYGDSDWYFDVWGAGTTVTVSSEPKSSDKTHTCPPCPAPELLGGPSVFLFPPKPKDTLMISRTPEVTCVVVDVSHEDPEVKFNWYVDGVEVHNAKTKPREEQYNSTYRVVSVLTVLHQDWLNGKEYKCKVSNKALPAPIEKTISKAKGQPREPQVYTLPPSRDELTKNQVSLTCLVKGFYPSDIAVEWESNGQPENNYKTTPPVLDSDGSFFLYSKLTVDKSRWQQGNVFSCSVMHEALHNHYTQKSLSLSPGK

SEQ ID NO: 41 - DNA, 1525 bp, Artificial sequence
  Synthetic polynucleotide
  misc_feature: G19-4 HL SMIP (PN)
aagcttgccgccatggaagcaccagcgcagcttctcttcctcctgctactctggctcccagataccaccggtgaggtccagctgcaacagtctggacctgaactggtgaagcctggagcttcaatgaagatttcctgcaaggcctctggttactcattcactggctacatcgtgaactggctgaagcagagccatggaaagaaccttgagtggattggacttattaatccatacaaaggtcttactacctacaaccagaaattcaagggcaaggccacattgactgtagacaagtcatccagcacagcctacatggagctcctcagtctgacatctgaagactctgcagtctattactgtgcaagatctgggtactatggtgactcagactggtacttcgatgtctggggcgcagggaccacagtcaccgtctcctctggcggcggtggctcgggcggtggtggatctggaggaggtgggagcgctagcgacatccagatgacacagactacatcctccctgtctgcctctctgggagacagagtcaccatcagttgcagggcaagtcaggacattcgcaattatttgaactggtatcagcagaaaccagatggaactgttaaactcctgatctactacacatcaagactacactcaggagtcccatcaaggttcagtggcagtgggtctggaacagattattctctcaccattgccaacctgcaaccagaagatattgccacttacttttgccaacagggtaatacacttccctggacgttcggtggagggaccaaactggtgaccaaacgctcgagcgagcccaaatcttctgacaaaactcacacatgcccaccgtgcccagcacctgaactcctgggtggaccgtcagtcttcctcttccccccaaaacccaaggacaccctcatgatctcccggacccctgaggtcacatgcgtggtggtggacgtgagccacgaagaccctgaggtcaagttcaactggtacgtggacggcgtggaggtgcataatgccaagacaaagccgcgggaggagcagtacaacagcacgtaccgtgtggtcagcgtcctcaccgtcctgcaccaggactggctgaatggcaaggagtacaagtgcaaggtctccaacaaagccctcccagcccccatcgagaaaaccatctccaaagccaaagggcagccccgagaaccacaggtgtacaccctgcccccatcccgggatgagctgaccaagaaccaggtcagcctgacctgcctggtcaaaggcttctatccaagcgacatcgccgtggagtgggagagcaatgggcagccggagaacaactacaagaccacgcctcccgtgctggactccgacggctccttcttcctctacagcaagctcaccgtggacaagagcaggtggcagcaggggaacgtcttctcatgctccgtgatgcatgaggctctgcacaaccactacacgcagaagagcctctccctgtctccgggtaagtgactctaga

SEQ ID NO: 42 - protein, 501 aa, Artificial sequence [sequence omitted]

SEQ ID NO: 43 - DNA, 2328 bp, Artificial sequence
  Synthetic polynucleotide
  misc_feature: n2H7sssIgG1-STD1-2e12HL (PN)
aagcttgccgccatggaagcaccagcgcagcttctcttcctcctgctactctggctcccagataccaccggtcaaattgttctctcccagtctccagcaatcctgtctgcatctccaggggagaaggtcacaatgacttgcagggccagctcaagtgtaagttacatgcactggtaccagcagaagccaggatcctcccccaaaccctggatttatgccccatccaacctggcttctggagtccctgctcgcttcagtggcagtgggtctgggacctcttactctctcacaatcagcagagtggaggctgaagatgctgccacttattactgccagcagtggagttttaacccacccacgttcggtgctgggaccaagctggagctgaaagatggcggtggctcgggcggtggtggatctggaggaggtggagctagccaggcttatctacagcagtctggggctgagctggtgaggcctggggcctcagtgaagatgtcctgcaaggcttctggctacacatttaccagttacaatatgcactgggtaaagcagacacctagacagggcctggaatggattggagctatttatccaggaaatggtgatacttcctacaatcagaagttcaagggcaaggccacactgactgtagacaaatcctccagcacagcctacatgcagctcagcagcctgacatctgaagactctgcggtctatttctgtgcaagagtggtgtactatagtaactcttactggtacttcgatgtctggggcacagggaccacggtcaccgtctcgagcgagcccaaatcttctgacaaaactcacacatccccaccgagcccagcacctgaactcctggggggaccgtcagtcttcctcttccccccaaaacccaaggacaccctcatgatctcccggacccctgaggtcacatgcgtggtggtggacgtgagccacgaagaccctgaggtcaagttcaactggtacgtggacggcgtggaggtgcataatgccaagacaaagccgcgggaggagcagtacaacagcacgtaccgtgtggtcagcgtcctcaccgtcctgcaccaggactggctgaatggcaaggagtacaagtgcaaggtctccaacaaagccctcccagcccccatcgagaaaacaatctccaaagccaaagggcagccccgagaaccacaggtgtacaccctgcccccatcccgggatgagctgaccaagaaccaggtcagcctgacctgcctggtcaaaggcttctatcccagcgacatcgccgtggagtgggagagcaatgggcagccggagaacaactacaagaccacgcctcccgtgctggactccgacggctccttcttcctctacagcaagctcaccgtggacaagagcaggtggcagcaggggaacgtcttctcatgctccgtgatgcatgaggctctgcacaaccactacacgcagaagagcctctccctgtctccgggtaagaattatggtggcggtggctcgggcggtggtggatctggaggaggtgggagtgggaattctcaggtgcagctgaaggagtcaggacctggcctggtggcgccctcacagagcctgtccatcacatgcaccgtctcagggttctcattaaccggctatggtgtaaactgggttcgccagcctccaggaaagggtctggagtggctgggaatgatatggggtgatggaagcacagactataattcagctctcaaatccagactatcgatcaccaaggacaactccaagagccaagttttcttaaaaatgaacagtctgcaaactgatgacacagccagatactactgtgctcgagatggttatagtaactttcattactatgttatggactactggggtcaaggaacctcagtcaccgtctcctctgggggtggaggctctggtggcggtggatccggcggaggtgggtcgggtggcggcggatctgacattgtgctcacccaatctccagcttctttggctgtgtctctaggtcagagagccaccatctcctgcagagccagtgaaagtgttgaatattatgtcacaagtttaatgcagtggtaccaacagaaaccaggacagccacccaaactcctcatctctgctgctagcaacgtagaatctggggtccctgccaggtttagtggcagtgggtctgggacagactttagcctcaacatccatcctgtggaggaggatgatattgcaatgtatttctgtcagcaaagtaggaaggttccatggacgttcggtggaggcaccaagctggaaatcaaacgttaatctaga

SEQ ID NO: 44 - protein, 769 aa, Artificial sequence
  Synthetic polypeptide
  misc_feature: n2H7sssIgG1-STD1-2e12HL (AA)
  misc_feature (1)..(20): Leader
  misc_feature (21)..(127): VL
  misc_feature (128)..(142): Linker
  misc_feature (143)..(264): VH
  misc_feature (265)..(279): Hinge
  misc_feature (497)..(516): EFD-BD2 Linker
  misc_feature (517)..(637): VH2
  misc_feature (638)..(657): Linker2
  misc_feature (658)..(769): VL2
MEAPAQLLFLLLLWLPDTTGQIVLSQSPAILSASPGEKVTMTCRASSSVSYMHWYQQKPGSSPKPWIYAPSNLASGVPARFSGSGSGTSYSLTISRVEAEDAATYYCQQWSFNPPTFGAGTKLELKDGGGSGGGGSGGGGASQAYLQQSGAELVRPGASVKMSCKASGYTFTSYNMHWVKQTPRQGLEWIGAIYPGNGDTSYNQKFKGKATLTVDKSSSTAYMQLSSLTSEDSAVYFCARVVYYSNSYWYFDVWGTGTTVTVSSEPKSSDKTHTSPPSPAPELLGGPSVFLFPPKPKDTLMISRTPEVTCVVVDVSHEDPEVKFNWYVDGVEVHNAKTKPREEQYNSTYRVVSVLTVLHQDWLNGKEYKCKVSNKALPAPIEKTISKAKGQPREPQVYTLPPSRDELTKNQVSLTCLVKGFYPSDIAVEWESNGQPENNYKTTPPVLDSDGSFFLYSKLTVDKSRWQQGNVFSCSVMHEALHNHYTQKSLSLSPGKNYGGGGSGGGGSGGGGSGNSQVQLKESGPGLVAPSQSLSITCTVSGFSLTGYGVNWVRQPPGKGLEWLGMIWGDGSTDYNSALKSRLSITKDNSKSQVFLKMNSLQTDDTARYYCARDGYSNFHYYVMDYWGQGTSVTVSSGGGGSGGGGSGGGGSGGGGSDIVLTQSPASLAVSLGQRATISCRASESVEYYVTSLMQWYQQKPGQPPKLLISAASNVESGVPARFSGSGSGTDFSLNIHPVEEDDIAMYFCQQSRKVPWTFGGGTKLEIKR

SEQ ID NO: 45 - DNA, 2313 bp, Artificial sequence
  Synthetic polynucleotide
  misc_feature: n2H7sssIgG1-STD2-2e12LH (PN)
aagcttgccgccatggaagcaccagcgcagcttctcttcctcctgctactctggctcccagataccaccggtcaaattgttctctcccagtctccagcaatcctgtctgcatctccaggggagaaggtcacaatgacttgcagggccagctcaagtgtaagttacatgcactggtaccagcagaagccaggatcctcccccaaaccctggatttatgccccatccaacctggcttctggagtccctgctcgcttcagtggcagtgggtctgggacctcttactctctcacaatcagcagagtggaggctgaagatgctgccacttattactgccagcagtggagttttaacccacccacgttcggtgctgggaccaagctggagctgaaagatggcggtggctcgggcggtggtggatctggaggaggtggagctagccaggcttatctacagcagtctggggctgagctggtgaggcctggggcctcagtgaagatgtcctgcaaggcttctggctacacatttaccagttacaatatgcactgggtaaagcagacacctagacagggcctggaatggattggagctatttatccaggaaatggtgatacttcctacaatcagaagttcaagggcaaggccacactgactgtagacaaatcctccagcacagcctacatgcagctcagcagcctgacatctgaagactctgcggtctatttctgtgcaagagtggtgtactatagtaactcttactggtacttcgatgtctggggcacagggaccacggtcaccgtctcgagcgagcccaaatcttctgacaaaactcacacatccccaccgagcccagcacctgaactcctggggggaccgtcagtcttcctcttccccccaaaacccaaggacaccctcatgatctcccggacccctgaggtcacatgcgtggtggtggacgtgagccacgaagaccctgaggtcaagttcaactggtacgtggacggcgtggaggtgcataatgccaagacaaagccgcgggaggagcagtacaacagcacgtaccgtgtggtcagcgtcctcaccgtcctgcaccaggactggctgaatggcaaggagtacaagtgcaaggtctccaacaaagccctcccagcccccatcgagaaaacaatctccaaagccaaagggcagccccgagaaccacaggtgtacaccctgcccccatcccgggatgagctgaccaagaaccaggtcagcctgacctgcctggtcaaaggcttctatcccagcgacatcgccgtggagtgggagagcaatgggcagccggagaacaactacaagaccacgcctcccgtgctggactccgacggctccttcttcctctacagcaagctcaccgtggacaagagcaggtggcagcaggggaacgtcttctcatgctccgtgatgcatgaggctctgcacaaccactacacgcagaagagcctctccctgtctccgggtaagaattatggtggcggtggctcgggcggtggtggatctggaggaggtgggagtgggaattctgacattgtgctcacccaatctccagcttctttggctgtgtctctaggtcagagagccaccatctcctgcagagccagtgaaagtgttgaatattatgtcacaagtttaatgcagtggtaccaacagaaaccaggacagccacccaaactcctcatctctgctgctagcaacgtagaatctggggtccctgccaggtttagtggcagtgggtctgggacagactttagcctcaacatccatcctgtggaggaggatgatattgcaatgtatttctgtcagcaaagtaggaaggttccatggacgttcggtggaggcaccaagctggaaatcaaacggggtggcggtggatccggcggaggtgggtcgggtggcggcggatctcaggtgcagctgaaggagtcaggacctggcctggtggcgccctcacagagcctgtccatcacatgcaccgtctcagggttctcattaaccggctatggtgtaaactgggttcgccagcctccaggaaagggtctggagtggctgggaatgatatggggtgatggaagcacagactataattcagctctcaaatccagactatcgatcaccaaggacaactccaagagccaagttttcttaaaaatgaacagtctgcaaactgatgacacagccagatactactgtgctcgagatggttatagtaactttcattactatgttatggactactggggtcaaggaacctcagtcaccgtctcctcttaatctaga

SEQ ID NO: 46 - protein, 764 aa, Artificial sequence
  Synthetic polypeptide
  misc_feature: n2H7sssIgG1-STD2-2e12LH (AA)
  misc_feature (1)..(20): Leader
  misc_feature (21)..(126): VL
  misc_feature (127)..(142): Linker
  misc_feature (143)..(264): VH
  misc_feature (265)..(279): Hinge
  misc_feature (497)..(516): EFD-BD2 Linker
  misc_feature (517)..(628): VL2
  misc_feature (629)..(643): Linker
  misc_feature (644)..(764): VH2
MEAPAQLLFLLLLWLPDTTGQIVLSQSPAILSASPGEKVTMTCRASSSVSYMHWYQQKPGSSPKPWIYAPSNLASGVPARFSGSGSGTSYSLTISRVEAEDAATYYCQQWSFNPPTFGAGTKLELKDGGGSGGGGSGGGGASQAYLQQSGAELVRPGASVKMSCKASGYTFTSYNMHWVKQTPRQGLEWIGAIYPGNGDTSYNQKFKGKATLTVDKSSSTAYMQLSSLTSEDSAVYFCARVVYYSNSYWYFDVWGTGTTVTVSSEPKSSDKTHTSPPSPAPELLGGPSVFLFPPKPKDTLMISRTPEVTCVVVDVSHEDPEVKFNWYVDGVEVHNAKTKPREEQYNSTYRVVSVLTVLHQDWLNGKEYKCKVSNKALPAPIEKTISKAKGQPREPQVYTLPPSRDELTKNQVSLTCLVKGFYPSDIAVEWESNGQPENNYKTTPPVLDSDGSFFLYSKLTVDKSRWQQGNVFSCSVMHEALHNHYTQKSLSLSPGKNYGGGGSGGGGSGGGGSGNSDIVLTQSPASLAVSLGQRATISCRASESVEYYVTSLMQWYQQKPGQPPKLLISAASNVESGVPARFSGSGSGTDFSLNIHPVEEDDIAMYFCQQSRKVPWTFGGGTKLEIKRGGGGSGGGGSGGGGSQVQLKESGPGLVAPSQSLSITCTVSGFSLTGYGVNWVRQPPGKGLEWLGMIWGDGSTDYNSALKSRLSITKDNSKSQVFLKMNSLQTDDTARYYCARDGYSNFHYYVMDYWGQGTSVTVSS

SEQ ID NO: 47 - DNA, 2048 bp, Artificial sequence
  Synthetic polynucleotide
  misc_feature: n2H7sssIgG1-H1-2e12HL (PN)
aagcttgccgccatggaagcaccagcgcagcttctcttcctcctgctactctggctcccagataccaccggtcaaattgttctctcccagtctccagcaatcctgtctgcatctccaggggagaaggtcacaatgacttgcagggccagctcaagtgtaagttacatgcactggtaccagcagaagccaggatcctcccccaaaccctggatttatgccccatccaacctggcttctggagtccctgctcgcttcagtggcagtgggtctgggacctcttactctctcacaatcagcagagtggaggctgaagatgctgccacttattactgccagcagtggagttttaacccacccacgttcggtgctgggaccaagctggagctgaaagatggcggtggctcgggcggtggtggatctggaggaggtggagctagccaggcttatctacagcagtctggggctgagctggtgaggcctggggcctcagtgaagatgtcctgcaaggcttctggctacacatttaccagttacaatatgcactgggtaaagcagacacctagacagggcctggaatggattggagctatttatccaggaaatggtgatacttcctacaatcagaagttcaagggcaaggccacactgactgtagacaaatcctccagcacagcctacatgcagctcagcagcctgacatctgaagactctgcggtctatttctgtgcaagagtggtgtactatagtaactcttactggtacttcgatgtctggggcacagggaccacggtcaccgtctcgagcgagcccaaatcttctgacaaaactcacacatccccaccgagcccagcacctgaactcctggggggaccgtcagtcttcctcttccccccaaaacccaaggacaccctcatgatctcccggacccctgaggtcacatgcgtggtggtggacgtgagccacgaagaccctgaggtcaagttcaactggtacgtggacggcgtggaggtgcataatgccaagacaaagccgcgggaggagcagtacaacagcacgtaccgtgtggtcagcgtcctcaccgtcctgcaccaggactggctgaatggcaaggagtacaagtgcaaggtctccaacaaagccctcccagcccccatcgagaaaacaatctccaaagccaaagggcagccccgagaaccacaggtgtacaccctgcccccatcccgggatgagctgaccaagaaccaggtcagcctgacctgcctggtcaaaggcttctatcccagcgacatcgccgtggagtgggagagcaatgggcagccggagaacaactacaagaccacgcctcccgtgctggactccgacggctccttcttcctctacagcaagctcaccgtggacaagagcaggtggcagcaggggaacgtcttctcatgctccgtgatgcatgaggctctgcacaaccactacacgcagaagagcctctccctgtctccgggtaagaattctcaggtgcagctgaaggagtcaggacctggcctggtggcgccctcacagagcctgtccatcacatgcaccgtctcagggttctcattaaccggctatggtgtaaactgggttcgccagcctccaggaaagggtctggagtggctgggaatgatatggggtgatggaagcacagactataattcagctctcaaatccagactatcgatcaccaaggacaactccaagagccaagttttcttaaaaatgaacagtctgcaaactgatgacacagccagatactactgtgctcgagatggttatagtaactttcattactatgttatggactactggggtcaaggaacctcagtcaccgtctcctctgggggtggaggctctggtggcggtggatccggcggaggtgggtcgggtggcggcggatctgacattgtgctcacccaatctccagcttctttggctgtgtctctaggtcagagagccaccatctcctgcagagccagtgaaagtgttgaatattatgtcacaagtttaatgcagtggta

SEQ ID NO: 48 - protein, 751 aa, Artificial sequence
  Synthetic polypeptide
  misc_feature: n2H7sssIgG1-H1-2e12HL (AA)
  misc_feature (1)..(20): Leader
  misc_feature (21)..(126): VL
  misc_feature (127)..(142): Linker
  misc_feature (143)..(264): VH
  misc_feature (265)..(279): Hinge
  misc_feature (497)..(498): EFD-BD2 Linker
  misc_feature (499)..(619): VH2
  misc_feature (620)..(639): Linker2
  misc_feature (640)..(751): VL2
MEAPAQLLFLLLLWLPDTTGQIVLSQSPAILSASPGEKVTMTCRASSSVSYMHWYQQKPGSSPKPWIYAPSNLASGVPARFSGSGSGTSYSLTISRVEAEDAATYYCQQWSFNPPTFGAGTKLELKDGGGSGGGGSGGGGASQAYLQQSGAELVRPGASVKMSCKASGYTFTSYNMHWVKQTPRQGLEWIGAIYPGNGDTSYNQKFKGKATLTVDKSSSTAYMQLSSLTSEDSAVYFCARVVYYSNSYWYFDVWGTGTTVTVSSEPKSSDKTHTSPPSPAPELLGGPSVFLFPPKPKDTLMISRTPEVTCVVVDVSHEDPEVKFNWYVDGVEVHNAKTKPREEQYNSTYRVVSVLTVLHQDWLNGKEYKCKVSNKALPAPIEKTISKAKGQPREPQVYTLPPSRDELTKNQVSLTCLVKGFYPSDIAVEWESNGQPENNYKTTPPVLDSDGSFFLYSKLTVDKSRWQQGNVFSCSVMHEALHNHYTQKSLSLSPGKNSQVQLKESGPGLVAPSQSLSITCTVSGFSLTGYGVNWVRQPPGKGLEWLGMIWGDGSTDYNSALKSRLSITKDNSKSQVFLKMNSLQTDDTARYYCARDGYSNFHYYVMDYWGQGTSVTVSSGGGGSGGGGSGGGGSGGGGSDIVLTQSPASLAVSLGQRATISCRASESVEYYVTSLMQWYQQKPGQPPKLLISAASNVESGVPARFSGSGSGTDFSLNIHPVEEDDIAMYFCQQSRKVPWTFGGGTKLEIKR

SEQ ID NO: 49 - DNA, 2292 bp, Artificial sequence
  Synthetic polynucleotide
  misc_feature: n2H7sssIgG1-H2-2e12HL (PN)
aagcttgccgccatggaagcaccagcgcagcttctcttcctcctgctactctggctcccagataccaccggtcaaattgttctctcccagtctccagcaatcctgtctgcatctccaggggagaaggtcacaatgacttgcagggccagctcaagtgtaagttacatgcactggtaccagcagaagccaggatcctcccccaaaccctggatttatgccccatccaacctggcttctggagtccctgctcgcttcagtggcagtgggtctgggacctcttactctctcacaatcagcagagtggaggctgaagatgctgccacttattactgccagcagtggagttttaacccacccacgttcggtgctgggaccaagctggagctgaaagatggcggtggctcgggcggtggtggatctggaggaggtggagctagccaggcttatctacagcagtctggggctgagctggtgaggcctggggcctcagtgaagatgtcctgcaaggcttctggctacacatttaccagttacaatatgcactgggtaaagcagacacctagacagggcctggaatggattggagctatttatccaggaaatggtgatacttcctacaatcagaagttcaagggcaaggccacactgactgtagacaaatcctccagcacagcctacatgcagctcagcagcctgacatctgaagactctgcggtctatttctgtgcaagagtggtgtactatagtaactcttactggtacttcgatgtctggggcacagggaccacggtcaccgtctcgagcgagcccaaatcttctgacaaaactcacacatccccaccgagcccagcacctgaactcctggggggaccgtcagtcttcctcttccccccaaaacccaaggacaccctcatgatctcccggacccctgaggtcacatgcgtggtggtggacgtgagccacgaagaccctgaggtcaagttcaactggtacgtggacggcgtggaggtgcataatgccaagacaaagccgcgggaggagcagtacaacagcacgtaccgtgtggtcagcgtcctcaccgtcctgcaccaggactggctgaatggcaaggagtacaagtgcaaggtctccaacaaagccctcccagcccccatcgagaaaacaatctccaaagccaaagggcagccccgagaaccacaggtgtacaccctgcccccatcccgggatgagctgaccaagaaccaggtcagcctgacctgcctggtcaaaggcttctatcccagcgacatcgccgtggagtgggagagcaatgggcagccggagaacaactacaagaccacgcctcccgtgctggactccgacggctccttcttcctctacagcaagctcaccgtggacaagagcaggtggcagcaggggaacgtcttctcatgctccgtgatgcatgaggctctgcacaaccactacacgcagaagagcctctccctgtctccgggtaagggtggcggtggctcggggaattctcaggtgcagctgaaggagtcaggacctggcctggtggcgccctcacagagcctgtccatcacatgcaccgtctcagggttctcattaaccggctatggtgtaaactgggttcgccagcctccaggaaagggtctggagtggctgggaatgatatggggtgatggaagcacagactataattcagctctcaaatccagactatcgatcaccaaggacaactccaagagccaagttttcttaaaaatgaacagtctgcaaactgatgacacagccagatactactgtgctcgagatggttatagtaactttcattactatgttatggactactggggtcaaggaacctcagtcaccgtctcctctgggggtggaggctctggtggcggtggatccggcggaggtgggtcgggtggcggcggatctgacattgtgctcacccaatctccagcttctttggctgtgtctctaggtcagagagccaccatctcctgcagagccagtgaaagtgttgaatattatgtcacaagtttaatgcagtggtaccaacagaaaccaggacagccacccaaactcctcatctctgctgctagcaacgtagaatctggggtccctgccaggtttagtggcagtgggtctgggacagactttagcctcaacatccatcctgtggaggaggatgatattgcaatgtatttctgtcagcaaagtaggaaggttccatggacgttcggtggaggcaccaagctggaaatcaaacgttaatctaga

SEQ ID NO: 50 - protein, 757 aa, Artificial sequence
  Synthetic polypeptide
  misc_feature: n2H7sssIgG1-H2-2e12HL (AA)
  misc_feature (1)..(20): Leader
  misc_feature (21)..(126): VL
  misc_feature (127)..(142): Linker
  misc_feature (143)..(264): VH
  misc_feature (265)..(279): Hinge
  misc_feature (497)..(504): EFD-BD2 Linker
  misc_feature (505)..(625): VH2
  misc_feature (626)..(645): Linker2
  misc_feature (646)..(757): VL2
MEAPAQLLFLLLLWLPDTTGQIVLSQSPAILSASPGEKVTMTCRASSSVSYMHWYQQKPGSSPKPWIYAPSNLASGVPARFSGSGSGTSYSLTISRVEAEDAATYYCQQWSFNPPTFGAGTKLELKDGGGSGGGGSGGGGASQAYLQQSGAELVRPGASVKMSCKASGYTFTSYNMHWVKQTPRQGLEWIGAIYPGNGDTSYNQKFKGKATLTVDKSSSTAYMQLSSLTSEDSAVYFCARVVYYSNSYWYFDVWGTGTTVTVSSEPKSSDKTHTSPPSPAPELLGGPSVFLFPPKPKDTLMISRTPEVTCVVVDVSHEDPEVKFNWYVDGVEVHNAKTKPREEQYNSTYRVVSVLTVLHQDWLNGKEYKCKVSNKALPAPIEKTISKAKGQPREPQVYTLPPSRDELTKNQVSLTCLVKGFYPSDIAVEWESNGQPENNYKTTPPVLDSDGSFFLYSKLTVDKSRWQQGNVFSCSVMHEALHNHYTQKSLSLSPGKGGGGSGNSQVQLKESGPGLVAPSQSLSITCTVSGFSLTGYGVNWVRQPPGKGLEWLGMIWGDGSTDYNSALKSRLSITKDNSKSQVFLKMNSLQTDDTARYYCARDGYSNFHYYVMDYWGQGTSVTVSSGGGGSGGGGSGGGGSGGGGSDIVLTQSPASLAVSLGQRATISCRASESVEYYVTSLMQWYQQKPGQPPKLLISAASNVESGVPARFSGSGSGTDFSLNIHPVEEDDIAMYFCQQSRKVPWTFGGGTKLEIKR

SEQ ID NO: 51 - DNA, 2298 bp, Artificial sequence
  Synthetic polynucleotide
  misc_feature: n2H7sssIgG1-H3-2e12HL (PN)
aagcttgccgccatggaagcaccagcgcagcttctcttcctcctgctactctggctcccagataccaccggtcaaattgttctctcccagtctccagcaatcctgtctgcatctccaggggagaaggtcacaatgacttgcagggccagctcaagtgtaagttacatgcactggtaccagcagaagccaggatcctcccccaaaccctggatttatgccccatccaacctggcttctggagtccctgctcgcttcagtggcagtgggtctgggacctcttactctctcacaatcagcagagtggaggctgaagatgctgccacttattactgccagcagtggagttttaacccacccacgttcggtgctgggaccaagctggagctgaaagatggcggtggctcgggcggtggtggatctggaggaggtggagctagccaggcttatctacagcagtctggggctgagctggtgaggcctggggcctcagtgaagatgtcctgcaaggcttctggctacacatttaccagttacaatatgcactgggtaaagcagacacctagacagggcctggaatggattggagctatttatccaggaaatggtgatacttcctacaatcagaagttcaagggcaaggccacactgactgtagacaaatcctccagcacagcctacatgcagctcagcagcctgacatctgaagactctgcggtctatttctgtgcaagagtggtgtactatagtaactcttactggtacttcgatgtctggggcacagggaccacggtcaccgtctcgagcgagcccaaatcttctgacaaaactcacacatccccaccgagcccagcacctgaactcctggggggaccgtcagtcttcctcttccccccaaaacccaaggacaccctcatgatctcccggacccctgaggtcacatgcgtggtggtggacgtgagccacgaagaccctgaggtcaagttcaactggtacgtggacggcgtggaggtgcataatgccaagacaaagccgcgggaggagcagtacaacagcacgtaccgtgtggtcagcgtcctcaccgtcctgcaccaggactggctgaatggcaaggagtacaagtgcaaggtctccaacaaagccctcccagcccccatcgagaaaacaatctccaaagccaaagggcagccccgagaaccacaggtgtacaccctgcccccatcccgggatgagctgaccaagaaccaggtcagcctgacctgcctggtcaaaggcttctatcccagcgacatcgccgtggagtgggagagcaatgggcagccggagaacaactacaagaccacgcctcccgtgctggactccgacggctccttcttcctctacagcaagctcaccgtggacaagagcaggtggcagcaggggaacgtcttctcatgctccgtgatgcatgaggctctgcacaaccactacacgcagaagagcctctccctgtctccgggtaagaattatggtggcggtggctctgggaattctcaggtgcagctgaaggagtcaggacctggcctggtggcgccctcacagagcctgtccatcacatgcaccgtctcagggttctcattaaccggctatggtgtaaactgggttcgccagcctccaggaaagggtctggagtggctgggaatgatatggggtgatggaagcacagactataattcagctctcaaatccagactatcgatcaccaaggacaactccaagagccaagttttcttaaaaatgaacagtctgcaaactgatgacacagccagatactactgtgctcgagatggttatagtaactttcattactatgttatggactactggggtcaaggaacctcagtcaccgtctcctctgggggtggaggctctggtggcggtggatccggcggaggtgggtcgggtggcggcggatctgacattgtgctcacccaatctccagcttctttggctgtgtctctaggtcagagagccaccatctcctgcagagccagtgaaagtgttgaatattatgtcacaagtttaatgcagtggtaccaacagaaaccaggacagccacccaaactcctcatctctgctgctagcaacgtagaatctggggtccctgccaggtttagtggcagtgggtctgggacagactttagcctcaacatccatcctgtggaggaggatgatattgcaatgtatttctgtcagcaaagtaggaaggttccatggacgttcggtggaggcaccaagctggaaatcaaacgttaatctaga

SEQ ID NO: 52 - protein, 759 aa, Artificial sequence
  Synthetic polypeptide
  misc_feature: n2H7sssIgG1-H3-2e12HL (AA)
  misc_feature (1)..(20): Leader
  misc_feature (21)..(126): VL
  misc_feature (127)..(142): Linker
  misc_feature (143)..(264): VH
  misc_feature (265)..(279): Hinge
  misc_feature (497)..(506): EFD-BD2 Linker
  misc_feature (507)..(627): VH2
  misc_feature (628)..(647): Linker2
  misc_feature (648)..(759): VL2
MEAPAQLLFLLLLWLPDTTGQIVLSQSPAILSASPGEKVTMTCRASSSVSYMHWYQQKPGSSPKPWIYAPSNLASGVPARFSGSGSGTSYSLTISRVEAEDAATYYCQQWSFNPPTFGAGTKLELKDGGGSGGGGSGGGGASQAYLQQSGAELVRPGASVKMSCKASGYTFTSYNMHWVKQTPRQGLEWIGAIYPGNGDTSYNQKFKGKATLTVDKSSSTAYMQLSSLTSEDSAVYFCARVVYYSNSYWYFDVWGTGTTVTVSSEPKSSDKTHTSPPSPAPELLGGPSVFLFPPKPKDTLMISRTPEVTCVVVDVSHEDPEVKFNWYVDGVEVHNAKTKPREEQYNSTYRVVSVLTVLHQDWLNGKEYKCKVSNKALPAPIEKTISKAKGQPREPQVYTLPPSRDELTKNQVSLTCLVKGFYPSDIAVEWESNGQPENNYKTTPPVLDSDGSFFLYSKLTVDKSRWQQGNVFSCSVMHEALHNHYTQKSLSLSPGKNYGGGGSGNSQVQLKESGPGLVAPSQSLSITCTVSGFSLTGYGVNWVRQPPGKGLEWLGMIWGDGSTDYNSALKSRLSITKDNSKSQVFLKMNSLQTDDTARYYCARDGYSNFHYYVMDYWGQGTSVTVSSGGGGSGGGGSGGGGSGGGGSDIVLTQSPASLAVSLGQRATISCRASESVEYYVTSLMQWYQQKPGQPPKLLISAASNVESGVPARFSGSGSGTDFSLNIHPVEEDDIAMYFCQQSRKVPWTFGGGTKLEIKR

SEQ ID NO: 53 - DNA, 2307 bp, Artificial sequence
  Synthetic polynucleotide
  misc_feature: n2H7sssIgG1-H4-2e12HL (PN)
aagcttgccgccatggaagcaccagcgcagcttctcttcctcctgctactctggctcccagataccaccggtcaaattgttctctcccagtctccagcaatcctgtctgcatctccaggggagaaggtcacaatgacttgcagggccagctcaagtgtaagttacatgcactggtaccagcagaagccaggatcctcccccaaaccctggatttatgccccatccaacctggcttctggagtccctgctcgcttcagtggcagtgggtctgggacctcttactctctcacaatcagcagagtggaggctgaagatgctgccacttattactgccagcagtggagttttaacccacccacgttcggtgctgggaccaagctggagctgaaagatggcggtggctcgggcggtggtggatctggaggaggtggagctagccaggcttatctacagcagtctggggctgagctggtgaggcctggggcctcagtgaagatgtcctgcaaggcttctggctacacatttaccagttacaatatgcactgggtaaagcagacacctagacagggcctggaatggattggagctatttatccaggaaatggtgatacttcctacaatcagaagttcaagggcaaggccacactgactgtagacaaatcctccagcacagcctacatgcagctcagcagcctgacatctgaagactctgcggtctatttctgtgcaagagtggtgtactatagtaactcttactggtacttcgatgtctggggcacagggaccacggtcaccgtctcgagcgagcccaaatcttctgacaaaactcacacatccccaccgagcccagcacctgaactcctggggggaccgtcagtcttcctcttccccccaaaacccaaggacaccctcatgatctcccggacccctgaggtcacatgcgtggtggtggacgtgagccacgaagaccctgaggtcaagttcaactggtacgtggacggcgtggaggtgcataatgccaagacaaagccgcgggaggagcagtacaacagcacgtaccgtgtggtcagcgtcctcaccgtcctgcaccaggactggctgaatggcaaggagtacaagtgcaaggtctccaacaaagccctcccagcccccatcgagaaaacaatctccaaagccaaagggcagccccgagaaccacaggtgtacaccctgcccccatcccgggatgagctgaccaagaaccaggtcagcctgacctgcctggtcaaaggcttctatcccagcgacatcgccgtggagtgggagagcaatgggcagccggagaacaactacaagaccacgcctcccgtgctggactccgacggctccttcttcctctacagcaagctcaccgtggacaagagcaggtggcagcaggggaacgtcttctcatgctccgtgatgcatgaggctctgcacaaccactacacgcagaagagcctctccctgtctccgggtaagggtggcggtggctcgggcggtggtggatctgggaattctcaggtgcagctgaaggagtcaggacctggcctggtggcgccctcacagagcctgtccatcacatgcaccgtctcagggttctcattaaccggctatggtgtaaactgggttcgccagcctccaggaaagggtctggagtggctgggaatgatatggggtgatggaagcacagactataattcagctctcaaatccagactatcgatcaccaaggacaactccaagagccaagttttcttaaaaatgaacagtctgcaaactgatgacacagccagatactactgtgctcgagatggttatagtaactttcattactatgttatggactactggggtcaaggaacctcagtcaccgtctcctctgggggtggaggctctggtggcggtggatccggcggaggtgggtcgggtggcggcggatctgacattgtgctcacccaatctccagcttctttggctgtgtctctaggtcagagagccaccatctcctgcagagccagtgaaagtgttgaatattatgtcacaagtttaatgcagtggtaccaacagaaaccaggacagccacccaaactcctcatctctgctgctagcaacgtagaatctggggtccctgccaggtttagtggcagtgggtctgggacagactttagcctcaacatccatcctgtggaggaggatgatattgcaatgtatttctgtcagcaaagtaggaaggttccatggacgttcggtggaggcaccaagctggaaatcaaacgttaatctaga

SEQ ID NO: 54 - protein, 762 aa, Artificial sequence
  Synthetic polypeptide
  misc_feature: n2H7sssIgG1-H4-2e12HL (AA)
  misc_feature (1)..(20): Leader
  misc_feature (21)..(126): VL
  misc_feature (127)..(142): Linker
  misc_feature (143)..(264): VH
  misc_feature (265)..(279): Hinge
  misc_feature (497)..(509): EFD-BD2 Linker
  misc_feature (510)..(630): VH2
  misc_feature (631)..(650): Linker2
  misc_feature (651)..(762): VL2
MEAPAQLLFLLLLWLPDTTGQIVLSQSPAILSASPGEKVTMTCRASSSVSYMHWYQQKPGSSPKPWIYAPSNLASGVPARFSGSGSGTSYSLTISRVEAEDAATYYCQQWSFNPPTFGAGTKLELKDGGGSGGGGSGGGGASQAYLQQSGAELVRPGASVKMSCKASGYTFTSYNMHWVKQTPRQGLEWIGAIYPGNGDTSYNQKFKGKATLTVDKSSSTAYMQLSSLTSEDSAVYFCARVVYYSNSYWYFDVWGTGTTVTVSSEPKSSDKTHTSPPSPAPELLGGPSVFLFPPKPKDTLMISRTPEVTCVVVDVSHEDPEVKFNWYVDGVEVHNAKTKPREEQYNSTYRVVSVLTVLHQDWLNGKEYKCKVSNKALPAPIEKTISKAKGQPREPQVYTLPPSRDELTKNQVSLTCLVKGFYPSDIAVEWESNGQPENNYKTTPPVLDSDGSFFLYSKLTVDKSRWQQGNVFSCSVMHEALHNHYTQKSLSLSPGKGGGGSGGGGSGNSQVQLKESGPGLVAPSQSLSITCTVSGFSLTGYGVNWVRQPPGKGLEWLGMIWGDGSTDYNSALKSRLSITKDNSKSQVFLKMNSLQTDDTARYYCARDGYSNFHYYVMDYWGQGTSVTVSSGGGGSGGGGSGGGGSGGGGSDIVLTQSPASLAVSLGQRATISCRASESVEYYVTSLMQWYQQKPGQPPKLLISAASNVESGVPARFSGSGSGTDFSLNIHPVEEDDIAMYFCQQSRKVPWTFGGGTKLEIKR

SEQ ID NO: 55 - DNA, 2313 bp, Artificial sequence
  Synthetic polynucleotide
  misc_feature: n2H7sssIgG1-H5-2e12HL (PN)
aagcttgccgccatggaagcaccagcgcagcttctcttcctcctgctactctggctcccagataccaccggtcaaattgttctctcccagtctccagcaatcctgtctgcatctccaggggagaaggtcacaatgacttgcagggccagctcaagtgtaagttacatgcactggtaccagcagaagccaggatcctcccccaaaccctggatttatgccccatccaacctggcttctggagtccctgctcgcttcagtggcagtgggtctgggacctcttactctctcacaatcagcagagtggaggctgaagatgctgccacttattactgccagcagtggagttttaacccacccacgttcggtgctgggaccaagctggagctgaaagatggcggtggctcgggcggtggtggatctggaggaggtggagctagccaggcttatctacagcagtctggggctgagctggtgaggcctggggcctcagtgaagatgtcctgcaaggcttctggctacacatttaccagttacaatatgcactgggtaaagcagacacctagacagggcctggaatggattggagctatttatccaggaaatggtgatacttcctacaatcagaagttcaagggcaaggccacactgactgtagacaaatcctccagcacagcctacatgcagctcagcagcctgacatctgaagactctgcggtctatttctgtgcaagagtggtgtactatagtaactcttactggtacttcgatgtctggggcacagggaccacggtcaccgtctcgagcgagcccaaatcttctgacaaaactcacacatccccaccgagcccagcacctgaactcctggggggaccgtcagtcttcctcttccccccaaaacccaaggacaccctcatgatctcccggacccctgaggtcacatgcgtggtggtggacgtgagccacgaagaccctgaggtcaagttcaactggtacgtggacggcgtggaggtgcataatgccaagacaaagccgcgggaggagcagtacaacagcacgtaccgtgtggtcagcgtcctcaccgtcctgcaccaggactggctgaatggcaaggagtacaagtgcaaggtctccaacaaagccctcccagcccccatcgagaaaacaatctccaaagccaaagggcagccccgagaaccacaggtgtacaccctgcccccatcccgggatgagctgaccaagaaccaggtcagcctgacctgcctggtcaaaggcttctatcccagcgacatcgccgtggagtgggagagcaatgggcagccggagaacaactacaagaccacgcctcccgtgctggactccgacggctccttcttcctctacagcaagctcaccgtggacaagagcaggtggcagcaggggaacgtcttctcatgctccgtgatgcatgaggctctgcacaaccactacacgcagaagagcctctccctgtctccgggtaagaattatggtggcggtggctcgggcggtggtggatctgggaattctcaggtgcagctgaaggagtcaggacctggcctggtggcgccctcacagagcctgtccatcacatgcaccgtctcagggttctcattaaccggctatggtgtaaactgggttcgccagcctccaggaaagggtctggagtggctgggaatgatatggggtgatggaagcacagactataattcagctctcaaatccagactatcgatcaccaaggacaactccaagagccaagttttcttaaaaatgaacagtctgcaaactgatgacacagccagatactactgtgctcgagatggttatagtaactttcattactatgttatggactactggggtcaaggaacctcagtcaccgtctcctctgggggtggaggctctggtggcggtggatccggcggaggtgggtcgggtggcggcggatctgacattgtgctcacccaatctccagcttctttggctgtgtctctaggtcagagagccaccatctcctgcagagccagtgaaagtgttgaatattatgtcacaagtttaatgcagtggtaccaacagaaaccaggacagccacccaaactcctcatctctgctgctagcaacgtagaatctggggtccctgccaggtttagtggcagtgggtctgggacagactttagcctcaacatccatcctgtggaggaggatgatattgcaatgtatttctgtcagcaaagtaggaaggttccatggacgttcggtggaggcaccaagctggaaatcaaacgttaatctaga

SEQ ID NO: 56 - protein, 764 aa, Artificial sequence
  Synthetic polypeptide
  misc_feature: n2H7sssIgG1-H5-2e12HL (AA)
  misc_feature (11)..(20): Leader
  misc_feature (21)..(126): VL
  misc_feature (127)..(142): Linker
  misc_feature (143)..(264): VH
  misc_feature (265)..(279): Hinge
  misc_feature (497)..(511): EFD-BD2 Linker
  misc_feature (512)..(632): VH2
  misc_feature (633)..(652): Linker2
  misc_feature (653)..(764): VL2
MEAPAQLLFLLLLWLPDTTGQIVLSQSPAILSASPGEKVTMTCRASSSVSYMHWYQQKPGSSPKPWIYAPSNLASGVPARFSGSGSGTSYSLTISRVEAEDAATYYCQQWSFNPPTFGAGTKLELKDGGGSGGGGSGGGGASQAYLQQSGAELVRPGASVKMSCKASGYTFTSYNMHWVKQTPRQGLEWIGAIYPGNGDTSYNQKFKGKATLTVDKSSSTAYMQLSSLTSEDSAVYFCARVVYYSNSYWYFDVWGTGTTVTVSSEPKSSDKTHTSPPSPAPELLGGPSVFLFPPKPKDTLMISRTPEVTCVVVDVSHEDPEVKFNWYVDGVEVHNAKTKPREEQYNSTYRVVSVLTVLHQDWLNGKEYKCKVSNKALPAPIEKTISKAKGQPREPQVYTLPPSRDELTKNQVSLTCLVKGFYPSDIAVEWESNGQPENNYKTTPPVLDSDGSFFLYSKLTVDKSRWQQGNVFSCSVMHEALHNHYTQKSLSLSPGKNYGGGGSGGGGSGNSQVQLKESGPGLVAPSQSLSITCTVSGFSLTGYGVNWVRQPPGKGLEWLGMIWGDGSTDYNSALKSRLSITKDNSKSQVFLKMNSLQTDDTARYYCARDGYSNFHYYVMDYWGQGTSVTVSSGGGGSGGGGSGGGGSGGGGSDIVLTQSPASLAVSLGQRATISCRASESVEYYVTSLMQWYQQKPGQPPKLLISAASNVESGVPARFSGSGSGTDFSLNIHPVEEDDIAMYFCQQSRKVPWTFGGGTKLEIKR

SEQ ID NO: 57 - DNA, 2322 bp, Artificial sequence
  Synthetic polynucleotide
  misc_feature: n2H7sssIgG1-H6-2e12HL (PN)
aagcttgccgccatggaagcaccagcgcagcttctcttcctcctgctactctggctcccagataccaccggtcaaattgttctctcccagtctccagcaatcctgtctgcatctccaggggagaaggtcacaatgacttgcagggccagctcaagtgtaagttacatgcactggtaccagcagaagccaggatcctcccccaaaccctggatttatgccccatccaacctggcttctggagtccctgctcgcttcagtggcagtgggtctgggacctcttactctctcacaatcagcagagtggaggctgaagatgctgccacttattactgccagcagtggagttttaacccacccacgttcggtgctgggaccaagctggagctgaaagatggcggtggctcgggcggtggtggatctggaggaggtggagctagccaggcttatctacagcagtctggggctgagctggtgaggcctggggcctcagtgaagatgtcctgcaaggcttctggctacacatttaccagttacaatatgcactgggtaaagcagacacctagacagggcctggaatggattggagctatttatccaggaaatggtgatacttcctacaatcagaagttcaagggcaaggccacactgactgtagacaaatcctccagcacagcctacatgcagctcagcagcctgacatctgaagactctgcggtctatttctgtgcaagagtggtgtactatagtaactcttactggtacttcgatgtctggggcacagggaccacggtcaccgtctcgagcgagcccaaatcttctgacaaaactcacacatccccaccgagcccagcacctgaactcctggggggaccgtcagtcttcctcttccccccaaaacccaaggacaccctcatgatctcccggacccctgaggtcacatgcgtggtggtggacgtgagccacgaagaccctgaggtcaagttcaactggtacgtggacggcgtggaggtgcataatgccaagacaaagccgcgggaggagcagtacaacagcacgtaccgtgtggtcagcgtcctcaccgtcctgcaccaggactggctgaatggcaaggagtacaagtgcaaggtctccaacaaagccctcccagcccccatcgagaaaacaatctccaaagccaaagggcagccccgagaaccacaggtgtacaccctgcccccatcccgggatgagctgaccaagaaccaggtcagcctgacctgcctggtcaaaggcttctatcccagcgacatcgccgtggagtgggagagcaatgggcagccggagaacaactacaagaccacgcctcccgtgctggactccgacggctccttcttcctctacagcaagctcaccgtggacaagagcaggtggcagcaggggaacgtcttctcatgctccgtgatgcatgaggctctgcacaaccactacacgcagaagagcctctccctgtctccgggtaagggtggcggtggctcgggcggtggtggatctgggggaggaggcagcgggaattctcaggtgcagctgaaggagtcaggacctggcctggtggcgccctcacagagcctgtccatcacatgcaccgtctcagggttctcattaaccggctatggtgtaaactgggttcgccagcctccaggaaagggtctggagtggctgggaatgatatggggtgatggaagcacagactataattcagctctcaaatccagactatcgatcaccaaggacaactccaagagccaagttttcttaaaaatgaacagtctgcaaactgatgacacagccagatactactgtgctcgagatggttatagtaactttcattactatgttatggactactggggtcaaggaacctcagtcaccgtctcctctgggggtggaggctctggtggcggtggatccggcggaggtgggtcgggtggcggcggatctgacattgtgctcacccaatctccagcttctttggctgtgtctctaggtcagagagccaccatctcctgcagagccagtgaaagtgttgaatattatgtcacaagtttaatgcagtggtaccaacagaaaccaggacagccacccaaactcctcatctctgctgctagcaacgtagaatctggggtccctgccaggtttagtggcagtgggtctgggacagactttagcctcaacatccatcctgtggaggaggatgatattgcaatgtatttctgtcagcaaagtaggaaggttccatggacgttcggtggaggcaccaagctggaaatcaaacgttaatctaga

SEQ ID NO: 58 - protein, 767 aa, Artificial sequence
  Synthetic polypeptide
  misc_feature: n2H7sssIgG1-H6-2e12HL (AA)
  misc_feature (1)..(20): Leader
  misc_feature (21)..(126): VL
  misc_feature (127)..(142): Linker
  misc_feature (143)..(264): VH
  misc_feature (265)..(279): Hinge
  misc_feature (497)..(514): EFD-BD2 Linker
  misc_feature (515)..(635): VH2
  misc_feature (636)..(655): Linker2
  misc_feature (656)..(767): VL2
MEAPAQLLFLLLLWLPDTTGQIVLSQSPAILSASPGEKVTMTCRASSSVSYMHWYQQKPGSSPKPWIYAPSNLASGVPARFSGSGSGTSYSLTISRVEAEDAATYYCQQWSFNPPTFGAGTKLELKDGGGSGGGGSGGGGASQAYLQQSGAELVRPGASVKMSCKASGYTFTSYNMHWVKQTPRQGLEWIGAIYPGNGDTSYNQKFKGKATLTVDKSSSTAYMQLSSLTSEDSAVYFCARVVYYSNSYWYFDVWGTGTTVTVSSEPKSSDKTHTSPPSPAPELLGGPSVFLFPPKPKDTLMISRTPEVTCVVVDVSHEDPEVKFNWYVDGVEVHNAKTKPREEQYNSTYRVVSVLTVLHQDWLNGKEYKCKVSNKALPAPIEKTISKAKGQPREPQVYTLPPSRDELTKNQVSLTCLVKGFYPSDIAVEWESNGQPENNYKTTPPVLDSDGSFFLYSKLTVDKSRWQQGNVFSCSVMHEALHNHYTQKSLSLSPGKGGGGSGGGGSGGGGSGNSQVQLKESGPGLVAPSQSLSITCTVSGFSLTGYGVNWVRQPPGKGLEWLGMIWGDGSTDYNSALKSRLSITKDNSKSQVFLKMNSLQTDDTARYYCARDGYSNFHYYVMDYWGQGTSVTVSSGGGGSGGGGSGGGGSGGGGSDIVLTQSPASLAVSLGQRATISCRASESVEYYVTSLMQWYQQKPGQPPKLLISAASNVESGVPARFSGSGSGTDFSLNIHPVEEDDIAMYFCQQSRKVPWTFGGGTKLEIKR

SEQ ID NO: 59 - DNA, 2337 bp, Artificial sequence
  Synthetic polynucleotide
  misc_feature: 2H7cscIgG1-STD1-2e12HL (PN)
aagcttgccgccatggattttcaagtgcagattttcagcttcctgctaatcagtgcttcagtcataatgtccagaggacaaattgttctctcccagtctccagcaatcctgtctgcatctccaggggagaaggtcacaatgacttgcagggccagctcaagtgtaagttacatgcactggtaccagcagaagccaggatcctcccccaaaccctggatttatgccccatccaacctggcttctggagtccctgctcgcttcagtggcagtgggtctgggacctcttactctctcacaatcagcagagtggaggctgaagatgctgccacttattactgccagcagtggagttttaacccacccacgttcggtgctgggaccaagctggagctgaaagatggcggtggctcgggcggtggtggatctggaggaggtgggagctctcaggcttatctacagcagtctggggctgagtcggtgaggcctggggcctcagtgaagatgtcctgcaaggcttctggctacacatttaccagttacaatatgcactgggtaaagcagacacctagacagggcctggaatggattggagctatttatccaggaaatggtgatacttcctacaatcagaagttcaagggcaaggccacactgactgtagacaaatcctccagcacagcctacatgcagctcagcagcctgacatctgaagactctgcggtctatttctgtgcaagagtggtgtactatagtaactcttactggtacttcgatgtctggggcacagggaccacggtcaccgtctctgatcaggagcccaaatcttgtgacaaaactcacacatccccaccgtgctcagcacctgaactcctggggggaccgtcagtcttcctcttccccccaaaacccaaggacaccctcatgatctcccggacccctgaggtcacatgcgtggtggtggacgtgagccacgaagaccctgaggtcaagttcaactggtacgtggacggcgtggaggtgcataatgccaagacaaagccgcgggaggagcagtacaacagcacgtaccgtgtggtcagcgtcctcaccgtcctgcaccaggactggctgaatggcaaggagtacaagtgcaaggtctccaacaaagccctcccagcccccatcgagaaaacaatctccaaagccaaagggcagccccgagaaccacaggtgtacaccctgcccccatcccgggatgagctgaccaagaaccaggtcagcctgacctgcctggtcaaaggcttctatcccagcgacatcgccgtggagtgggagagcaatgggcagccggagaacaactacaagaccacgcctcccgtgctggactccgacggctccttcttcctctacagcaagctcaccgtggacaagagcaggtggcagcaggggaacgtcttctcatgctccgtgatgcatgaggctctgcacaaccactacacgcagaagagcctctccctgtctccgggtaagaattatggtggcggtggctcgggcggtggtggatctggaggaggtgggagtgggaattctcaggtgcagctgaaggagtcaggacctggcctggtggcgccctcacagagcctgtccatcacatgcaccgtctcagggttctcattaaccggctatggtgtaaactgggttcgccagcctccaggaaagggtctggagtggctgggaatgatatggggtgatggaagcacagactataattcagctctcaaatccagactatcgatcaccaaggacaactccaagagccaagttttcttaaaaatgaacagtctgcaaactgatgacacagccagatactactgtgctcgagatggttatagtaactttcattactatgttatggactactggggtcaaggaacctcagtcaccgtctcctctgggggtggaggctctggtggcggtggatccggcggaggtgggtcgggtggcggcggatctgacattgtgctcacccaatctccagcttctttggctgtgtctctaggtcagagagccaccatctcctgcagagccagtgaaagtgttgaatattatgtcacaagtttaatgcagtggtaccaacagaaaccaggacagccacccaaactcctcatctctgctgctagcaacgtagaatctggggtccctgccaggtttagtggcagtgggtctgggacagactttagcctcaacatccatcctgtggaggaggatgatattgcaatgtatttctgtcagcaaagtaggaaggttccatggacgttcggtggaggcaccaagctggaaatcaaacgttaatctaga

SEQ ID NO: 60 - protein, 772 aa, Artificial sequence
  Synthetic polypeptide
  misc_feature: 2H7cscIgG1-STD1-2e12HL (w/2E12 leader) (AA)
  misc_feature (1)..(22): Leader
  misc_feature (23)..(128): VL
  misc_feature (129)..(144): Linker
  misc_feature (145)..(265): VH
  misc_feature (268)..(282): Hinge
  misc_feature (500)..(519): EFD-BD2 Linker
  misc_feature (520)..(640): VH2
  misc_feature (641)..(660): Linker2
  misc_feature (661)..(772): VL2
MDFQVQIFSFLLISASVIMSRGQIVLSQSPAILSASPGEKVTMTCRASSSVSYMHWYQQKPGSSPKPWIYAPSNLASGVPARFSGSGSGTSYSLTISRVEAEDAATYYCQQWSFNPPTFGAGTKLELKDGGGSGGGGSGGGGSSQAYLQQSGAESVRPGASVKMSCKASGYTFTSYNMHWVKQTPRQGLEWIGAIYPGNGDTSYNQKFKGKATLTVDKSSSTAYMQLSSLTSEDSAVYFCARVVYYSNSYWYFDVWGTGTTVTVSDQEPKSCDKTHTSPPCSAPELLGGPSVFLFPPKPKDTLMISRTPEVTCVVVDVSHEDPEVKFNWYVDGVEVHNAKTKPREEQYNSTYRVVSVLTVLHQDWLNGKEYKCKVSNKALPAPIEKTISKAKGQPREPQVYTLPPSRDELTKNQVSLTCLVKGFYPSDIAVEWESNGQPENNYKTTPPVLDSDGSFFLYSKLTVDKSRWQQGNVFSCSVMHEALHNHYTQKSLSLSPGKNYGGGGSGGGGSGGGGSGNSQVQLKESGPGLVAPSQSLSITCTVSGFSLTGYGVNWVRQPPGKGLEWLGMIWGDGSTDYNSALKSRLSITKDNSKSQVFLKMNSLQTDDTARYYCARDGYSNFHYYVMDYWGQGTSVTVSSGGGGSGGGGSGGGGSGGGGSDIVLTQSPASLAVSLGQRATISCRASESVEYYVTSLMQWYQQKPGQPPKLLISAASNVESGVPARFSGSGSGTDFSLNIHPVEEDDIAMYFCQQSRKVPWTFGGGTKLEIKR

SEQ ID NO: 61 - DNA, 45 bp, Artificial sequence
  Synthetic polynucleotide
  misc_feature: Hinge csc(p) -hIgG1 (PN)
gagcccaaatcttgtgacaaaactcacacatctccaccgtgccca

SEQ ID NO: 62 - protein, 15 aa, Artificial sequence
  Synthetic peptide
  misc_feature: Hinge csc(p) -hIgG1 (AA)
EPKSCDKTHTSPPCP

SEQ ID NO: 63 - protein, 15 aa, Homo sapiens
  misc_feature: Human IgG1 (CCC) hinge domain (AA)
EPKSCDKTHTCPPCP

SEQ ID NO: 64 - DNA, 45 bp, Artificial sequence
  Synthetic polynucleotide
  misc_feature: Hinge ssc(s)-hIgG1 (PN)
gagcccaaatcttctgacaaaactcacacatctccaccgtgctca

SEQ ID NO: 65 - protein, 15 aa, Artificial sequence
  Synthetic peptide
  misc_feature: Hinge ssc(s)-hIgG1 (AA)
EPKSSDKTHTSPPCS

SEQ ID NO: 66 - DNA, 45 bp, Artificial sequence
  Synthetic polynucleotide
  misc_feature: Hinge scc(s)-hIgG1 (PN)
gagcccaaatcttctgacaaaactcacacatgtccaccgtgctca

SEQ ID NO: 67 - protein, 15 aa, Artificial sequence
  Synthetic peptide
  misc_feature: Hinge scc(s)-hIgG1 (AA)
EPKSSDKTHTCPPCS

SEQ ID NO: 68 - DNA, 45 bp, Artificial sequence
  Synthetic polynucleotide
  misc_feature: Hinge css(s)-hIgG1 (PN)
gagcccaaatcttgtgacaaaactcacacatctccaccgagctca

SEQ ID NO: 69 - protein, 15 aa, Artificial sequence
  Synthetic peptide
  misc_feature: Hinge css(s)-hIgG1 (AA)
EPKSCDKTHTSPPSS

SEQ ID NO: 70 - DNA, 45 bp, Artificial sequence
  Synthetic polynucleotide
  misc_feature: Hinge scs(s) -hIgG1 (PN)
gagcccaaatcttgtgacaaaactcacacatgtccaccgagctca

SEQ ID NO: 71 - protein, 15 aa, Artificial sequence
  Synthetic peptide
  misc_feature: Hinge scs(s) -hIgG1 (AA)
EPKSSDKTHTCPPSS

SEQ ID NO: 72 - DNA, 90 bp, Artificial sequence
  Synthetic polynucleotide
  misc_feature: Hinge ccc(s) -hIgG1 (PN)
gagcccaaatcttctgacaaaactcacacatctccaccgtgcccagagcccaaatcttgtgacaaaactcacacatgtccaccgtgctca

SEQ ID NO: 73 - protein, 15 aa, Artificial sequence
  Synthetic peptide
  misc_feature: Hinge ccc(s) -hIgG1 (AA)
EPKSCDKTHTCPPCS

SEQ ID NO: 74 - DNA, 45 bp, Artificial sequence
  Synthetic polynucleotide
  misc_feature: Hinge ccc(p) -hIgG1 (PN)
gagcccaaatcttgtgacaaaactcacacatgtccaccgtgccca

SEQ ID NO: 75 - protein, 15 aa, Artificial sequence
  Synthetic primer
  misc_feature: Hinge ccc(p) -hIgG1 (AA)
EPKSCDKTHTCPPCP

SEQ ID NO: 76 - DNA, 45 bp, Artificial sequence
  Synthetic primer
  misc_feature: Hinge sss(p) -hIgG1 (PN)
gagcccaaatcttctgacaaaactcacacatctccaccgagccca

SEQ ID NO: 77 - protein, 15 aa, Artificial sequence
  Synthetic primer
  misc_feature: Hinge sss(p) -hIgG1 (AA)
EPKSSDKTHTSPPSP

SEQ ID NO: 78 - DNA, 45 bp, Artificial sequence
  Synthetic primer
  misc_feature: Hinge ssc(p) -hIgG1 (PN)
gagcccaaatcttctgacaaaactcacacatctccaccgtgccca

SEQ ID NO: 79 - protein, 15 aa, Artificial sequence
  Synthetic peptide
  misc_feature: Hinge ssc(p) -hIgG1 (AA)
EPKSSDKTHTSPPCP

SEQ ID NO: 80 - DNA, 45 bp, Artificial sequence
  Synthetic polynucleotide
  misc_feature: Hinge scc(p) -hIgG1 (PN)
gagcccaaatcttctgacaaaactcacacatgtccaccgtgccca

SEQ ID NO: 81 - protein, 15 aa, Artificial sequence
  Synthetic peptide
  misc_feature: Hinge scc(p) -hIgG1 (AA)
EPKSSDKTHTCPPCP

SEQ ID NO: 82 - DNA, 45 bp, Artificial sequence
  Synthetic polynucleotide
  misc_feature: Hinge css(p) -hIgG1 (PN)
gagcccaaatcttgtgacaaaactcacacatctccaccgagccca

SEQ ID NO: 83 - protein, 15 aa, Artificial sequence
  Synthetic peptide
  misc_feature: Hinge css(p) -hIgG1 (AA)
EPKSCDKTHTSPPSP

SEQ ID NO: 84 - DNA, 45 bp, Artificial sequence
  Synthetic polynucleotide
  misc_feature: Hinge scs(p) -hIgG1 (PN)
gagcccaaatcttgtgacaaaactcacacatgtccaccgagccca

SEQ ID NO: 85 - protein, 15 aa, Artificial sequence
  Synthetic peptide
  misc_feature: Hinge scs(p) -hIgG1 (AA)
EPKSSDKTHTCPPSP

SEQ ID NO: 86 - DNA, 18 bp, Artificial sequence
  Synthetic polynucleotide
  misc_feature: Hinge scppcp (PN)
agttgtccaccgtgccca

SEQ ID NO: 87 - protein, 6 aa, Artificial sequence
  Synthetic peptide
  misc_feature: Hinge scppcp (AA)
SCPPCP

SEQ ID NO: 88 - DNA, 45 bp, Artificial sequence
  Synthetic polynucleotide
gagcccaaatcttctgacaaaactcacacatctccaccgagctca

SEQ ID NO: 89 - protein, 15 aa, Artificial sequence
  Synthetic peptide
EPKSSDKTHTSPPSS

SEQ ID NO: 90 - DNA, 45 bp, Artificial sequence
  Synthetic polynucleotide
gagcccaaatcttgtgacaaaactcacacatctccaccgtgctca

SEQ ID NO: 91 - protein, 15 aa, Artificial sequence
  Synthetic peptide
EPKSCDKTHTSPPCS

SEQ ID NO: 92 - protein, 15 aa, Artificial sequence
  Synthetic peptide
  misc_feature: Hinge - wild-type
EPKSCDKTHTCPPCP

SEQ ID NO: 93 - protein, 15 aa, Artificial sequence
  Synthetic peptide
GGGGCDKTHTCPPCP

SEQ ID NO: 94 - protein, 15 aa, Artificial sequence
  Synthetic peptide
  misc_feature: Hinge 2
EPKSCGGGGGCPPCP

SEQ ID NO: 95 - protein, 15 aa, Artificial sequence
  Synthetic peptide
EPKSCDKTHTCGGCP

SEQ ID NO: 96 - protein, 15 aa, Artificial sequence
  Synthetic peptide
  misc_feature: Hinge 4
EPKSCDKTHTCPPCG

SEQ ID NO: 97 - protein, 15 aa, Artificial sequence
  Synthetic peptide
EPKSCDKTHTCPPSP

SEQ ID NO: 98 - protein, 15 aa, Artificial sequence
  Synthetic peptide
  misc_feature: Hinge 6
EPKSCDKTHTSPPCP

SEQ ID NO: 99 - protein, 15 aa, Artificial sequence
  Synthetic peptide
EPKSCDKCHTCPPCP

SEQ ID NO: 100 - protein, 15 aa, Artificial sequence
  Synthetic peptide
  misc_feature: Hinge 8
EPKSCDKTCCCPPCP

SEQ ID NO: 101 - protein, 15 aa, Artificial sequence
  Synthetic peptide
  misc_feature: Hinge 9
EPKSCPPPPPCPPCP

SEQ ID NO: 102 - protein, 15 aa, Artificial sequence
  Synthetic peptide
PPPPCDKTHTCPPCP

SEQ ID NO: 103 - protein, 13 aa, Artificial sequence
  Synthetic peptide
  misc_feature: Hinge 11
EPKSCDKTHTCCP

SEQ ID NO: 104 - protein, 13 aa, Artificial sequence
  Synthetic peptide
  misc_feature: Hinge 12
EPKSCDKTCPPCP

SEQ ID NO: 105 - protein, 11 aa, Artificial sequence
  Synthetic peptide
EPKSCDKTCCP

SEQ ID NO: 106 - protein, 18 aa, Artificial sequence
  Synthetic peptide
  misc_feature: Hinge 14
EPKSCDKTHTCPGGGPCP

SEQ ID NO: 107 - protein, 18 aa, Artificial sequence
  Synthetic peptide
  misc_feature: Hinge 15
EPKSCDGGGKTHTCPPCP

SEQ ID NO: 108 - protein, 18 aa, Artificial sequence
  Synthetic peptide
EPKSCDPPPKTHTCPPCP

SEQ ID NO: 109 - protein, 18 aa, Artificial sequence
  Synthetic peptide
  misc_feature: Hinge 17
EPKSCDKTHTCPPPPPCP

SEQ ID NO: 110 - protein, 15 aa, Artificial sequence
  Synthetic peptide
  misc_feature: Hinge 18
EPKSCDKTHTCWWCP

SEQ ID NO: 111 - protein, 15 aa, Artificial sequence
  Synthetic peptide
EPKSCDWWHTCPPCP

SEQ ID NO: 112 - protein, 15 aa, Artificial sequence
  Synthetic peptide
  misc_feature: Hinge 20
EPKCSDKTHTCPPCP

SEQ ID NO: 113 - protein, 15 aa, Artificial sequence
  Synthetic peptide
EPKSDCKTHTCPPCP

SEQ ID NO: 114 - protein, 15 aa, Artificial sequence
  Synthetic peptide
  misc_feature: Hinge 22
EPKSDCWWHTCPPCP

SEQ ID NO: 115 - protein, 15 aa, Artificial sequence
  Synthetic peptide
EPKSCDFFHTCPPCP

SEQ ID NO: 116 - protein, 15 aa, Artificial sequence
  Synthetic peptide
  misc_feature: Hinge 24
EPKSCDWWWTCPPCP

SEQ ID NO: 117 - protein, 15 aa, Artificial sequence
  Synthetic peptide
EPKSCWWTHTCPPCP

SEQ ID NO: 118 - protein, 15 aa, Artificial sequence
  Synthetic peptide
  misc_feature: Hinge 26
EPWWCDKTHTCPPCP

SEQ ID NO: 119 - DNA, 795 bp, Artificial sequence
  Synthetic polynucleotide
  misc_feature: anti-CD20 (2H7) LH (PN)
atggattttcaagtgcagattttcagcttcctgctaatcagtgcttcagtcataatgtccagaggacaaattgttctctcccagtctccagcaatcctgtctgcatctccaggggagaaggtcacaatgacttgcagggccagctcaagtgtaagttacatgcactggtaccagcagaagccaggatcctcccccaaaccctggatttatgccccatccaacctggcttctggagtccctgctcgcttcagtggcagtgggtctgggacctcttactctctcacaatcagcagagtggaggctgaagatgctgccacttattactgccagcagtggagttttaacccacccacgttcggtgctgggaccaagctggagctgaaagatggcggtggctcgggcggtggtggatctggaggaggtgggagctctcaggcttatctacagcagtctggggctgagtcggtgaggcctggggcctcagtgaagatgtcctgcaaggcttctggctacacatttaccagttacaatatgcactgggtaaagcagacacctagacagggcctggaatggattggagctatttatccaggaaatggtgatacttcctacaatcagaagttcaagggcaaggccacactgactgtagacaaatcctccagcacagcctacatgcagctcagcagcctgacatctgaagactctgcggtctatttctgtgcaagagtggtgtactatagtaactcttactggtacttcgatgtctggggcacagggaccacggtcaccgtctct

SEQ ID NO: 120 - protein, 265 aa, Artificial sequence
  Synthetic polypeptide
  misc_feature: anti-CD20 (2H7) LH (AA)
  misc_feature (1)..(22): Leader
  misc_feature (23)..(128): VL
  misc_feature (129)..(144): Linker
  misc_feature (145)..(265): VH
MDFQVQIFSFLLISASVIMSRGQIVLSQSPAILSASPGEKVTMTCRASSSVSYMHWYQQKPGSSPKPWIYAPSNLASGVPARFSGSGSGTSYSLTISRVEAEDAATYYCQQWSFNPPTFGAGTKLELKDGGGSGGGGSGGGGSSQAYLQQSGAESVRPGASVKMSCKASGYTFTSYNMHWVKQTPRQGLEWIGAIYPGNGDTSYNQKFKGKATLTVDKSSSTAYMQLSSLTSEDSAVYFCARVVYYSNSYWYFDVWGTGTTVTVS

SEQ ID NO: 121 - DNA, 717 bp, Artificial sequence
  Synthetic polynucleotide
caggtgcagctggtgcagtctggtgctgagagcaagaagcctggggcctcagtgaaggtttcctgcaaggccagcggatacaccttcaccagctacaatatgcactgggtgcgacaggcgcctggacaagggctagagtggatgggagctatctatcctggaaatggtgatacatcctacaatcagaagttcaagggcagggtcaccatgaccagagacacgtccacgagcacagtctacatggagctgagcagcctgagatctgaggacacggccgtgtattactgtgcccgaagctactatagtaactcttactggtacttcgatctctggggccgcggcaccctggtcactgtctcctcggggggcggtggatcgggcggtggtggatctgctagcgaaattgtgttgacacagtctccagccaccctgtctttgtctccaggtgaaagagccaccctctcctgcagggccagttccagtgttagctacattgtttggtaccaacagaaacctggccaggcacctaggctcctcatctatgccccatccaacctggcttctggaataccagccaggttcagtggcagtggatccgggacagacttcactctcaccatcagcagtcttgagcctgaagattttgcagtttattactgtcagcagtggagttttaaccctcccacgttcggccaagggaccaaggtggaaatcaaa

SEQ ID NO: 122 - protein, 239 aa, Artificial sequence
  Synthetic polypeptide
QVQLVQSGAESKKPGASVKVSCKASGYTFTSYNMHWVRQAPGQGLEWMGAIYPGNGDTSYNQKFKGRVTMTRDTSTSTVYMELSSLRSEDTAVYYCARSYYSNSYWYFDLWGRGTLVTVSSGGGGSGGGGSASEIVLTQSPATLSLSPGERATLSCRASSSVSYIVWYQQKPGQAPRLLIYAPSNLASGIPARFSGSGSGTDFTLTISSLEPEDFAVYYCQQWSFNPPTFGQGTKVEIK

SEQ ID NO: 123 - DNA, 732 bp, Artificial sequence
  Synthetic polynucleotide
caggtgcagctggtgcagtctggtgctgagagcaagaagcctggggcctcagtgaaggtttcctgcaaggccagcggatacaccttcaccagctacaatatgcactgggtgcgacaggcgcctggacaagggctagagtggatgggagctatctatcctggaaatggtgatacatcctacaatcagaagttcaagggcagggtcaccatgaccagagacacgtccacgagcacagtctacatggagctgagcagcctgagatctgaggacacggccgtgtattactgtgcccgaagctactatagtaactcttactggtacttcgatctctggggccgcggcaccctggtcactgtctcctcggggggcggtggatcgggcggtggtggatctggaggaggtgggtctgctagcgaaattgtgttgacacagtctccagccaccctgtctttgtctccaggtgaaagagccaccctctcctgcagggccagttccagtgttagctacattgtttggtaccaacagaaacctggccaggcacctaggctcctcatctatgccccatccaacctggcttctggaataccagccaggttcagtggcagtggatccgggacagacttcactctcaccatcagcagtcttgagcctgaagattttgcagtttattactgtcagcagtggagttttaaccctcccacgttcggccaagggaccaaggtggaaatcaaa

SEQ ID NO: 124 - protein, 244 aa, Artificial sequence
  Synthetic polypeptide
QVQLVQSGAESKKPGASVKVSCKASGYTFTSYNMHWVRQAPGQGLEWMGAIYPGNGDTSYNQKFKGRVTMTRDTSTSTVYMELSSLRSEDTAVYYCARSYYSNSYWYFDLWGRGTLVTVSSGGGGSGGGGSGGGGSASEIVLTQSPATLSLSPGERATLSCRASSSVSYIVWYQQKPGQAPRLLIYAPSNLASGIPARFSGSGSGTDFTLTISSLEPEDFAVYYCQQWSFNPPTFGQGTKVEIK

SEQ ID NO: 125 - DNA, 813 bp, Artificial sequence
  Synthetic polynucleotide
  misc_feature: anti-CD28 (2e12) VLVH (PN)
atggattttcaagtgcagattttcagcttcctgctaatcagtgcttcagtcataatgtccagaggagtcgacattgtgctcacccaatctccagcttctttggctgtgtctctaggtcagagagccaccatctcctgcagagccagtgaaagtgttgaatattatgtcacaagtttaatgcagtggtaccaacagaaaccaggacagccacccaaactcctcatctctgctgctagcaacgtagaatctggggtccctgccaggtttagtggcagtgggtctgggacagactttagcctcaacatccatcctgtggaggaggatgatattgcaatgtatttctgtcagcaaagtaggaaggttccatggacgttcggtggaggcaccaagctggaaatcaaacggggtggcggtggatccggcggaggtgggtcgggtggcggcggatctcaggtgcagctgaaggagtcaggacctggcctggtggcgccctcacagagcctgtccatcacatgcaccgtctcagggttctcattaaccggctatggtgtaaactgggttcgccagcctccaggaaagggtctggagtggctgggaatgatatggggtgatggaagcacagactataattcagctctcaaatccagactatcgatcaccaaggacaactccaagagccaagttttcttaaaaatgaacagtctgcaaactgatgacacagccagatactactgtgcccgagatggttatagtaactttcattactatgttatggactactggggtcaaggaacctcagtcaccgtctcctct

SEQ ID NO: 126 - protein, 271 aa, Artificial sequence
  Synthetic polynucleotide
  misc_feature: anti-CD28 (2e12) VLVH (AA)
  misc_feature (1)..(23): Leader
  misc_feature (24)..(135): VL
  misc_feature (136)..(150): Linker
  misc_feature (151)..(271): VH
MDFQVQIFSFLLISASVIMSRGVDIVLTQSPASLAVSLGQRATISCRASESVEYYVTSLMQWYQQKPGQPPKLLISAASNVESGVPARFSGSGSGTDFSLNIHPVEEDDIAMYFCQQSRKVPWTFGGGTKLEIKRGGGGSGGGGSGGGGSQVQLKESGPGLVAPSQSLSITCTVSGFSLTGYGVNWVRQPPGKGLEWLGMIWGDGSTDYNSALKSRLSITKDNSKSQVFLKMNSLQTDDTARYYCARDGYSNFHYYVMDYWGQGTSVTVSS

SEQ ID NO: 127 - DNA, 828 bp, Artificial sequence
  Synthetic polynucleotide
  misc_feature: anti-CD28 (2e12) VHVL (PN)
atggattttcaagtgcagattttcagcttcctgctaatcagtgcttcagtcataatgtccagaggagtccaggtgcagctgaaggagtcaggacctggcctggtggcgccctcacagagcctgtccatcacatgcaccgtctcagggttctcattaaccggctatggtgtaaactgggttcgccagcctccaggaaagggtctggagtggctgggaatgatatggggtgatggaagcacagactataattcagctctcaaatccagactatcgatcaccaaggacaactccaagagccaagttttcttaaaaatgaacagtctgcaaactgatgacacagccagatactactgtgcccgagatggttatagtaactttcattactatgttatggactactggggtcaaggaacctcagtcaccgtctcctctgggggtggaggctctggtggcggtggatccggcggaggtgggtcgggtggcggcggatctgacattgtgctcacccaatctccagcttctttggctgtgtctctaggtcagagagccaccatctcctgcagagccagtgaaagtgttgaatattatgtcacaagtttaatgcagtggtaccaacagaaaccaggacagccacccaaactcctcatctctgctgctagcaacgtagaatctggggtccctgccaggtttagtggcagtgggtctgggacagactttagcctcaacatccatcctgtggaggaggatgatattgcaatgtatttctgtcagcaaagtaggaaggttccatggacgttcggtggaggcaccaagctggaaatcaaacgt

SEQ ID NO: 128 - protein, 276 aa, Artificial sequence
  Synthetic polypeptide
  misc_feature: anti-CD28 (2e12) VHVL (AA)
  misc_feature (1)..(23): Leader
  misc_feature (24)..(144): VH
  misc_feature (145)..(164): Linker
  misc_feature (165)..(276): VL
MDFQVQIFSFLLISASVIMSRGVQVQLKESGPGLVAPSQSLSITCTVSGFSLTGYGVNWVRQPPGKGLEWLGMIWGDGSTDYNSALKSRLSITKDNSKSQVFLKMNSLQTDDTARYYCARDGYSNFHYYVMDYWGQGTSVTVSSGGGGSGGGGSGGGGSGGGGSDIVLTQSPASLAVSLGQRATISCRASESVEYYVTSLMQWYQQKPGQPPKLLISAASNVESGVPARFSGSGSGTDFSLNIHPVEEDDIAMYFCQQSRKVPWTFGGGTKLEIKR

SEQ ID NO: 129 - DNA, 725 bp, Artificial sequence
  Synthetic polynucleotide
  misc_feature: G-28-1 VLVH (PN)
accggtgacatccagatgactcagtctccagcctccctatctgcatctgtgggagagactgtcaccatcacatgtcgaacaagtgaaaatgtttacagttatttggcttggtatcagcagaaacagggaaaatctcctcagctcctggtctcttttgcaaaaaccttagcagaaggtgtgccatcaaggttcagtggcagtggatcaggcacacagttttctctgaagatcagcagcctgcagcctgaagattctggaagttatttctgtcaacatcattccgataatccgtggacgttcggtggaggcaccgaactggagatcaaaggtggcggtggctcgggcggtggtgggtcgggtggcggcggatctgctagcgcagtccagctgcagcagtctggacctgagctggaaaagcctggcgcttcagtgaagatttcctgcaaggcttctggttactcattcactggctacaatatgaactgggtgaagcagaataatggaaagagccttgagtggattggaaatattgatccttattatggtggtactacctacaaccggaagttcaagggcaaggccacattgactgtagacaaatcctccagcacagcctacatgcagctcaagagtctgacatctgaggactctgcagtctattactgtgcaagatcggtcggccctatggactactggggtcaaggaacctcagtcaccgtctcgag

SEQ ID NO: 130 - protein, 239 aa, Artificial sequence
  Synthetic polypeptide
  misc_feature: G-28-1 VLVH (AA)
  misc_feature (1)..(107): VL
  misc_feature (108)..(124): Linker
  misc_feature (125)..(239): VH
DIQMTQSPASLSASVGETVTITCRTSENVYSYLAWYQQKQGKSPQLLVSFAKTLAEGVPSRFSGSGSGTQFSLKISSLQPEDSGSYFCQHHSDNPWTFGGGTELEIKGGGGSGGGGSGGGGSASAVQLQQSGPELEKPGASVKISCKASGYSFTGYNMNWVKQNNGKSLEWIGNIDPYYGGTTYNRKFKGKATLTVDKSSSTAYMQLKSLTSEDSAVYYCARSVGPMDYWGQGTSVTVS

SEQ ID NO: 131 - DNA, 767 bp, Artificial sequence
  Synthetic polynucleotide
  misc_feature: G28-1 VHVL (PN)
accggtgaggtccagctgcaacagtctggacctgaactggtgaagcctggagcttcaatgaagatttcctgcaaggcctctggttactcattcactggctacatcgtgaactggctgaagcagagccatggaaagaaccttgagtggattggacttattaatccatacaaaggtcttactacctacaaccagaaattcaagggcaaggccacattaactgtagacaagtcatccagcacagcctacatggagctcctcagtctgacatctgaagactctgcagtctattactgtgcaagatctgggtactatggtgactcggactggtacttcgatgtctggggcgcagggaccacggtcaccgtctcctctggtggcggtggctcgggcggtggtggatctggaggaggtgggagcgggggaggtggcagtgctagcgacatccagatgacacagactacatcctccctgtctgcctctctgggagacagagtcaccatcagttgcagggcaagtcaggacattcgcaattatttaaactggtatcagcagaaaccagatggaactgttaaactcctgatctactacacatcaagattacactcaggagtcccatcaaggttcagtggcagtgggtctggaacagattattctctcaccattgccaacctgcaaccagaagatattgccacttacttttgccaacagggtaatacgcttccgtggacgttcggtggaggcaccaaactggtaaccaaacgctcgag

SEQ ID NO: 132 - protein, 253 aa, Artificial sequence
  Synthetic polypeptide
  misc_feature: G28-1 VHVL (AA)
  misc_feature (1)..(121): VH
  misc_feature (122)..(144): Linker
  misc_feature (145)..(253): VL
EVQLQQSGPELVKPGASMKISCKASGYSFTGYIVNWLKQSHGKNLEWIGLINPYKGLTTYNQKFKGKATLTVDKSSSTAYMELLSLTSEDSAVYYCARSGYYGDSDWYFDVWGAGTTVTVSSGGGGSGGGGSGGGGSGGGGSASDIQMTQTTSSLSASLGDRVTISCRASQDIRNYLNWYQQKPDGTVKLLIYYTSRLHSGVPSRFSGSGSGTDYSLTIANLQPEDIATYFCQQGNTLPWTFGGGTKLVTKRS

SEQ ID NO: 133 - DNA, 749 bp, Artificial sequence
  Synthetic polynucleotide
  misc_feature: G-19-4 VLVH (PN)
accggtgacatccagatgacacagactacatcctccctgtctgcctctctgggagacagagtcaccatcagttgcagggcaagtcaggacattcgcaattatttaaactggtatcagcagaaaccagatggaactgttaaactcctgatctactacacatcaagattacactcaggagtcccatcaaggttcagtggcagtgggtctggaacagattattctctcaccattgccaacctgcaaccagaagatattgccacttacttttgccaacagggtaatacgcttccgtggacgttcggtggaggcaccaaactggtaaccaaacggggtggcggtggctcgggcggtggtggatctggaggaggtgggagcgctagcgaggtccagctgcaacagtctggacctgaactggtgaagcctggagcttcaatgaagatttcctgcaaggcctctggttactcattcactggctacatcgtgaactggctgaagcagagccatggaaagaaccttgagtggattggacttattaatccatacaaaggtcttactacctacaaccagaaattcaagggcaaggccacattaactgtagacaagtcatccagcacagcctacatggagctcctcagtctgacatctgaagactctgcagtctattactgtgcaagatctgggtactatggtgactcggactggtacttcgatgtctggggcgcagggaccacggtcaccgtctcctcgag

SEQ ID NO: 134 - protein, 247 aa, Artificial sequence
  Synthetic polypeptide
  misc_feature: G-19-4 VLVH (AA)
  misc_feature (1)..(108): VL
  misc_feature (109)..(125): Linker
  misc_feature (126)..(247): VH
DIQMTQTTSSLSASLGDRVTISCRASQDIRNYLNWYQQKPDGTVKLLIYYTSRLHSGVPSRFSGSGSGTDYSLTIANLQPEDIATYFCQQGNTLPWTFGGGTKLVTKRGGGGSGGGGSGGGGSASEVQLQQSGPELVKPGASMKISCKASGYSFTGYIVNWLKQSHGKNLEWIGLINPYKGLTTYNQKFKGKATLTVDKSSSTAYMELLSLTSEDSAVYYCARSGYYGDSDWYFDVWGAGTTVTVSS

SEQ ID NO: 135 - DNA, 752 bp, Artificial sequence
  Synthetic polynucleotide
  misc_feature: G19-4 VHVL (PN)
accggtgaggtccagctgcaacagtctggacctgaactggtgaagcctggagcttcaatgaagatttcctgcaaggcctctggttactcattcactggctacatcgtgaactggctgaagcagagccatggaaagaaccttgagtggattggacttattaatccatacaaaggtcttactacctacaaccagaaattcaagggcaaggccacattaactgtagacaagtcatccagcacagcctacatggagctcctcagtctgacatctgaagactctgcagtctattactgtgcaagatctgggtactatggtgactcggactggtacttcgatgtctggggcgcagggaccacggtcaccgtctcctctggtggcggtggctcgggcggtggtggatctggaggaggtgggagcgctagcgacatccagatgacacagactacatcctccctgtctgcctctctgggagacagagtcaccatcagttgcagggcaagtcaggacattcgcaattatttaaactggtatcagcagaaaccagatggaactgttaaactcctgatctactacacatcaagattacactcaggagtcccatcaaggttcagtggcagtgggtctggaacagattattctctcaccattgccaacctgcaaccagaagatattgccacttacttttgccaacagggtaatacgcttccgtggacgttcggtggaggcaccaaactggtaaccaaacgctcgag

SEQ ID NO: 136 - protein, 248 aa, Artificial sequence
  Synthetic polypeptide
  misc_feature: G19-4 VHVL (AA)
  misc_feature (1)..(122): VH
  misc_feature (123)..(139): Linker
  misc_feature (140)..(248): VL
EVQLQQSGPELVKPGASMKISCKASGYSFTGYIVNWLKQSHGKNLEWIGLINPYKGLTTYNQKFKGKATLTVDKSSSTAYMELLSLTSEDSAVYYCARSGYYGDSDWYFDVWGAGTTVTVSSGGGGSGGGGSGGGGSASDIQMTQTTSSLSASLGDRVTISCRASQDIRNYLNWYQQKPDGTVKLLIYYTSRLHSGVPSRFSGSGSGTDYSLTIANLQPEDIATYFCQQGNTLPWTFGGGTKLVTKRS

SEQ ID NO: 137 - DNA, 744 bp, Artificial sequence
  Synthetic polynucloetide
gaggtgcagctggtgcagtctggagcagaggtgaaaaagcccggagagtctctgaagatttcctgtaagggctccggttactcattcactggctacaatatgaactgggtgcgccagatgcccgggaaaggcctcgagtggatgggcaatattgatccttattatggtggtactacctacaaccggaagttcaagggccaggtcactatctccgccgacaagtccatcagcaccgcctacctgcaatggagcagcctgaaggcctcggacaccgccatgtattactgtgcacgctcagtcggccctttcgactcctggggccagggcaccctggtcactgtctcctctgggggtggaggctctggtggcggtggctctggcggaggtggatccggtggcggcggatctggcgggggtggctctgaaattgtgttgacacagtctccagccaccctgtctttgtctccaggcgaaagagccaccctctcctgccgagcaagtgaaaatgtttacagctacttagcctggtaccaacagaaacctggccaggctcctaggctcctcatctattttgcaaaaaccttagcagaaggaattccagccaggttcagtggcagtggctccgggacagacttcactctcaccatcagcagcctagagcctgaagattttgcagtttattactgtcaacatcattccgataatccgtggacattcggccaagggaccaaggtggaaatcaaa

SEQ ID NO: 138 - protein, 248 aa, Artificial sequence
  Synthetic polypeptide
EVQLVQSGAEVKKPGESLKISCKGSGYSFTGYNMNWVRQMPGKGLEWMGNIDPYYGGTTYNRKFKGQVTISADKSISTAYLQWSSLKASDTAMYYCARSVGPFDSWGQGTLVTVSSGGGGSGGGGSGGGGSGGGGSGGGGSEIVLTQSPATLSLSPGERATLSCRASENVYSYLAWYQQKPGQAPRLLIYFAKTLAEGIPARFSGSGSGTDFTLTISSLEPEDFAVYYCQHHSDNPWTFGQGTKVEIK

SEQ ID NO: 139 - DNA, 654 bp, Artificial sequence
  Synthetic polynucleotide
  misc_feature: hIgG1 CH2CH3 (PN)
gcacctgaactcctgggtggaccgtcagtcttcctcttccccccaaaacccaaggacaccctcatgatctcccggacccctgaggtcacatgcgtggtggtggacgtgagccacgaagaccctgaggtcaagttcaactggtacgtggacggcgtggaggtgcataatgccaagacaaagccgcgggaggagcagtacaacagcacgtaccgtgtggtcagcgtcctcaccgtcctgcaccaggactggctgaatggcaaggagtacaagtgcaaggtctccaacaaagccctcccagcccccatcgagaaaacaatctccaaagccaaagggcagccccgagaaccacaggtgtacaccctgcccccatcccgggatgagctgaccaagaaccaggtcagcctgacctgcctggtcaaaggcttctatcccagcgacatcgccgtggagtgggagagcaatgggcagccggagaacaactacaagaccacgcctcccgtgctggactccgacggctccttcttcctctacagcaagctcaccgtggacaagagcaggtggcagcaggggaacgtcttctcatgctccgtgatgcatgaggctctgcacaaccactacacgcagaagagcctctccctgtctccgggtaaatga

SEQ ID NO: 140 - protein, 217 aa, Artificial sequence
  Synthetic polypeptide
  misc_feature: hIgG1 CH2CH3 (AA)
APELLGGPSVFLFPPKPKDTLMISRTPEVTCVVVDVSHEDPEVKFNWYVDGVEVHNAKTKPREEQYNSTYRVVSVLTVLHQDWLNGKEYKCKVSNKALPAPIEKTISKAKGQPREPQVYTLPPSRDELTKNQVSLTCLVKGFYPSDIAVEWESNGQPENNYKTTPPVLDSDGSFFLYSKLTVDKSRWQQGNVFSCSVMHEALHNHYTQKSLSLSPGK

SEQ ID NO: 141 - DNA, 654 bp, Artificial sequence
  Synthetic polynucleotide
gcacctgaactcctgggtggatcgtcagtcttcctcttccccccaaaacccaaggacaccctcatgatctcccggacccctgaggtcacatgcgtggtggtggacgtgagccacgaagaccctgaggtcaagttcaactggtacgtggacggcgtggaggtgcataatgccaagacaaagccgcgggaggagcagtacaacagcacgtaccgtgtggtcagcgtcctcaccgtcctgcaccaggactggctgaatggcaaggagtacaagtgcaaggtctccaacaaagccctcccagcccccatcgagaaaacaatctccaaagccaaagggcagccccgagaaccacaggtgtacaccctgcccccatcccgggatgagctgaccaagaaccaggtcagcctgacctgcctggtcaaaggcttctatcccagcgacatcgccgtggagtgggagagcaatgggcagccggagaacaactacaagaccacgcctcccgtgctggactccgacggctccttcttcctctacagcaagctcaccgtggacaagagcaggtggcagcaggggaacgtcttctcatgctccgtgatgcatgaggctctgcacaaccactacacgcagaagagcctctccctgtctccgggtaaatga

SEQ ID NO: 142 - protein, 217 aa, Artificial sequence
  Synthetic polypeptide
APELLGGSSVFLFPPKPKDTLMISRTPEVTCVVVDVSHEDPEVKFNWYVDGVEVHNAKTKPREEQYNSTYRVVSVLTVLHQDWLNGKEYKCKVSNKALPAPIEKTISKAKGQPREPQVYTLPPSRDELTKNQVSLTCLVKGFYPSDIAVEWESNGQPENNYKTTPPVLDSDGSFFLYSKLTVDKSRWQQGNVFSCSVMHEALHNHYTQKSLSLSPGK

SEQ ID NO: 143 - DNA, 654 bp, Artificial sequence
  Synthetic polynucleotide
gcacctgaactcctgggtggaccgtcagtcttcctcttccccccaaaacccaaggacaccctcatgatctcccggacccctgaggtcacatgcgtggtggtggacgtgagccacgaagaccctgaggtcaagttcaactggtacgtggacggcgtggaggtgcataatgccaagacaaagccgcgggaggagcagtacaacagcacgtaccgtgtggtcagcgtcctcaccgtcctgcaccaggactggctgaatggcaaggagtacaagtgcaaggtctccaacaaagccctcccagcctccatcgagaaaacaatctccaaagccaaagggcagccccgagaaccacaggtgtacaccctgcccccatcccgggatgagctgaccaagaaccaggtcagcctgacctgcctggtcaaaggcttctatcccagcgacatcgccgtggagtgggagagcaatgggcagccggagaacaactacaagaccacgcctcccgtgctggactccgacggctccttcttcctctacagcaagctcaccgtggacaagagcaggtggcagcaggggaacgtcttctcatgctccgtgatgcatgaggctctgcacaaccactacacgcagaagagcctctccctgtctccgggtaaatga

SEQ ID NO: 144 - protein, 217 aa, Homo sapiens
  misc_feature: hIgG1 (P331S) CH2CH3 (AA)
  misc_feature: Position 101 corresponds to position 331 (Kabat)
APELLGGPSVFLFPPKPKDTLMISRTPEVTCVVVDVSHEDPEVKFNWYVDGVEVHNAKTKPREEQYNSTYRVVSVLTVLHQDWLNGKEYKCKVSNKALPASIEKTISKAKGQPREPQVYTLPPSRDELTKNQVSLTCLVKGFYPSDIAVEWESNGQPENNYKTTPPVLDSDGSFFLYSKLTVDKSRWQQGNVFSCSVMHEALHNHYTQKSLSLSPGK

SEQ ID NO: 145 - DNA, 654 bp, Homo sapiens
  misc_feature: hIgG1 (P238S/P331S) CH2CH3 (PN)
gcacctgaactcctgggtggatcgtcagtcttcctcttccccccaaaacccaaggacaccctcatgatctcccggacccctgaggtcacatgcgtggtggtggacgtgagccacgaagaccctgaggtcaagttcaactggtacgtggacggcgtggaggtgcataatgccaagacaaagccgcgggaggagcagtacaacagcacgtaccgtgtggtcagcgtcctcaccgtcctgcaccaggactggctgaatggcaaggagtacaagtgcaaggtctccaacaaagccctcccagcctccatcgagaaaacaatctccaaagccaaagggcagccccgagaaccacaggtgtacaccctgcccccatcccgggatgagctgaccaagaaccaggtcagcctgacctgcctggtcaaaggcttctatcccagcgacatcgccgtggagtgggagagcaatgggcagccggagaacaactacaagaccacgcctcccgtgctggactccgacggctccttcttcctctacagcaagctcaccgtggacaagagcaggtggcagcaggggaacgtcttctcatgctccgtgatgcatgaggctctgcacaaccactacacgcagaagagcctctccctgtctccgggtaaatga

SEQ ID NO: 146 - protein, 217 aa, Homo sapiens
  misc_feature: hIgG1 (P238S/P331S) CH2CH3 (AA)
  misc_feature: Position 8 corresponds to position 238 (Kabat) Position 101 corresponds to position 331 (Kabat)
APELLGGSSVFLFPPKPKDTLMISRTPEVTCVVVDVSHEDPEVKFNWYVDGVEVHNAKTKPREEQYNSTYRVVSVLTVLHQDWLNGKEYKCKVSNKALPASIEKTISKAKGQPREPQVYTLPPSRDELTKNQVSLTCLVKGFYPSDIAVEWESNGQPENNYKTTPPVLDSDGSFFLYSKLTVDKSRWQQGNVFSCSVMHEALHNHYTQKSLSLSPGK

SEQ ID NO: 147 - DNA, 60 bp, Artificial sequence
  Synthetic peptide
  misc_feature: Linker STD1 (PN)
aattatggtggcggtggctcgggcggtggtggatctggaggaggtgggagtgggaattct

SEQ ID NO: 148 - protein, 20 aa, Artificial sequence
  Synthetic peptide
  misc_feature: Linker STD1 (AA)
NYGGGGSGGGGSGGGGSGNS

SEQ ID NO: 149 - DNA, 114 bp, Artificial sequence
  Synthetic primer
  misc_feature: Linker STD2 (PN)
aattatggtggcggtggctcgggcggtggtggatctggaggaggtgggagtgggaattatggtggcggtggctcgggcggtggtggatctggaggaggtgggagtgggaattct

SEQ ID NO: 150 - protein, 39 aa, Artificial sequence
  Synthetic peptide
  misc_feature: Linker STD2 (AA)
NNYGGGGSGGGGSGGGGSGNYGGGGSGGGGSGGGGSGNS

SEQ ID NO: 151 - DNA, 6 bp, Artificial sequence
  Synthetic peptide
  misc_feature: Linker H1 (PN)
aattct

SEQ ID NO: 152 - protein, 2 aa, Artificial sequence
  Synthetic peptide
NS

SEQ ID NO: 153 - DNA, 24 bp, Artificial sequence
  Synthetic peptide
  misc_feature: Linker H2 (PN)
ggtggcggtggctcggggaattct

SEQ ID NO: 154 - protein, 8 aa, Artificial sequence
  Synthetic peptide
GGGGSGNS

SEQ ID NO: 155 - DNA, 30 bp, Artificial sequence
  Synthetic polynucleotide
  misc_feature: Linker H3 (PN)
aattatggtggcggtggctctgggaattct

SEQ ID NO: 156 - protein, 10 aa, Artificial sequence
  Synthetic peptide
  misc_feature: Linker H3 (AA)
NYGGGGSGNS

SEQ ID NO: 157 - DNA, 39 bp, Artificial sequence
  Synthetic polynucleotide
  misc_feature: Linker H4 (PN)
ggtggcggtggctcgggcggtggtggatctgggaattct

SEQ ID NO: 158 - protein, 13 aa, Artificial sequence
  Synthetic peptide
  misc_feature: Linker H4 (AA)
GGGGSGGGGSGNS

SEQ ID NO: 159 - DNA, 45 bp, Artificial sequence
  Synthetic polynucleotide
  misc_feature: Linker H5 (PN)
aattatggtggcggtggctcgggcggtggtggatctgggaattct

SEQ ID NO: 160 - protein, 15 aa, Artificial sequence
  Synthetic peptide
  misc_feature: Linker H5 (AA)
NYGGGGSGGGGSGNS

SEQ ID NO: 161 - DNA, 54 bp, Artificial sequence
  Synthetic polynucleotide
  misc_feature: Linker H6 (PN)
ggtggcggtggctcgggcggtggtggatctgggggaggaggcagcgggaattct

SEQ ID NO: 162 - protein, 18 aa, Artificial sequence
  Synthetic peptide
GGGGSGGGGSGGGGSGNS

SEQ ID NO: 163 - DNA, 24 bp, Artificial sequence
  Synthetic polynucleotide
  misc_feature: Linker H7 (PN)
gggtgtccaccttgtccgaattct

SEQ ID NO: 164 - protein, 8 aa, Artificial sequence
  Syntehetic peptide
  misc_feature: Linker H7 (AA)
GCPPCPNS

SEQ ID NO: 165 - DNA, 24 bp, Artificial sequence
  Synthetic polynucleotide
  misc_feature: Linker H8 (PN)
gggtctccaccttctccgaattct

SEQ ID NO: 166 - protein, 8 aa, Artificial sequence
  Synthetic peptide
GSPPSPNS

SEQ ID NO: 167 - DNA, 21 bp, Artificial sequence
  Synthetic polynucleotide
  misc_feature: Linker H9a (PN)
tctccaccttctccgaattct

SEQ ID NO: 168 - protein, 7 aa, Artificial sequence
  Synthetic peptide
  misc_feature: Linker H9a (AA)
SPPSPNS

SEQ ID NO: 169-170 - skipped (2 entries)

SEQ ID NO: 171 - DNA, 51 bp, Artificial sequence
  Synthetic polynucleotide
  misc_feature: Linker H11a (PN)
gagcccacatctaccgacaaaactcacacatctccacccagcccgaattct

SEQ ID NO: 172 - protein, 17 aa, Artificial sequence
  Synthetic polynucleotide
  misc_feature: Linker H11a (AA)
EPTSTDKTHTSPPSPNS

SEQ ID NO: 173 - DNA, 51 bp, Artificial sequence; identical to SEQ ID NO: 171
  Synthetic polynucleotide
  misc_feature: Linker H12a (PN)

SEQ ID NO: 174 - protein, 17 aa, Artificial sequence
  Synthetic peptide
  misc_feature: Linker H12a (AA)
EPTSTDKTHTCPPCPNS

SEQ ID NO: 175 - DNA, 51 bp, Artificial sequence; identical to SEQ ID NO: 171
  Synthetic polynucleotide
  misc_feature: Linker  H13 (PN)

SEQ ID NO: 176 - protein, 17 aa, Artificial sequence
  Synthetic peptide
  misc_feature: Linker H13 (AA)
EPKSSDKTHTCPPCPNS

SEQ ID NO: 177-178 - skipped (2 entries)

SEQ ID NO: 179 - DNA, 36 bp, Artificial sequence
  Synthetic polynucleotide
  misc_feature: Linker H15 (PN)
ggcggtggtggctcctgtccaccttgtccgaattct

SEQ ID NO: 180 - protein, 12 aa, Artificial sequence
  Synthetic peptide
  misc_feature: Linker H15 (AA)
GGGGSCPPCPNS

SEQ ID NO: 181 - DNA, 45 bp, Artificial sequence
  Synthetic polynucleotide
  misc_feature: Linker H16 (PN)
ctgtctgtgaaagctgacttcctcactccatccatcgggaattct

SEQ ID NO: 182 - protein, 15 aa, Artificial sequence
  Synthetic peptide
  misc_feature: Linker H16 (AA)
LSVKADFLTPSIGNS

SEQ ID NO: 183 - DNA, 60 bp, Artificial sequence
  Synthetic polynucleotide
  misc_feature: Linker H17 (PN)
ctgtctgtgaaagctgacttcctcactccatccatctcctgtccaccttgcccgaattct

SEQ ID NO: 184 - protein, 20 aa, Artificial sequence
  Synthetic peptide
  misc_feature: Linker H17 (AA)
LSVKADFLTPSISCPPCPNS

SEQ ID NO: 185 - DNA, 45 bp, Artificial sequence
  Synthetic polynucleotide
  misc_feature: Linker  H18 (PN)
ctgtctgtgctcgctaacttcagtcagccagagatcgggaattct

SEQ ID NO: 186 - protein, 15 aa, Artificial sequence
  Synthetic peptide
  misc_feature: Linker H18 (AA)
LSVLANFSQPEIGNS

SEQ ID NO: 187 - DNA, 60 bp, Artificial sequence
  Synthetic polynucleotide
  misc_feature: Linker H19 (PN)
ctgtctgtgctcgctaacttcagtcagccagagatctcctgtccaccttgcccgaattct

SEQ ID NO: 188 - protein, 20 aa, Artificial sequence
  Synthetic peptide
  misc_feature: Linker H19 (AA)
LSVLANFSQPEISCPPCPNS

SEQ ID NO: 189 - DNA, 45 bp, Artificial sequence
  Synthetic polynucleotide
  misc_feature: Linker H20 (PN)
ctgaaaatccaggagagggtcagtaagccaaagatctcgaattct

SEQ ID NO: 190 - protein, 15 aa, Artificial sequence
  Synthetic peptide
  misc_feature: Linker H20 (AA)
LKIQERVSKPKISNS

SEQ ID NO: 191 - DNA, 60 bp, Artificial sequence
  Synthetic polypeptide
  misc_feature: Linker H21 (PN)
ctgaaaatccaggagagggtcagtaagccaaagatctcctgtccaccttgcccgaattct

SEQ ID NO: 192 - protein, 20 aa, Artificial sequence
  Synthetic peptide
  misc_feature: Linker H21 (AA)
LKIQERVSKPKISCPPCPNS

SEQ ID NO: 193 - DNA, 45 bp, Artificial sequence
  Synthetic polypeptide
  misc_feature: Linker H22 (PN)
ctggatgtgagtgagaggccttttcctccacacatccagaattct

SEQ ID NO: 194 - protein, 15 aa, Artificial sequence
  Synthetic peptide
  misc_feature: Linker H22 (AA)
LDVSERPFPPHIQNS

SEQ ID NO: 195 - DNA, 63 bp, Artificial sequence
  Synthetic polynucleotide
  misc_feature: Linker  H23 (PN)
ctggatgtgagtgagaggccttttcctccacacatccagtcctgtccaccttgcccgaattct

SEQ ID NO: 196 - protein, 21 aa, Artificial sequence
  Synthetic peptide
  misc_feature: Linker H23 (AA)
LDVSERPFPPHIQSCPPCPNS

SEQ ID NO: 197 - DNA, 45 bp, Artificial sequence
  Synthetic polynucleotide
cgggaacagctggcagaggtcactttgagcttgaaagcgaattct

SEQ ID NO: 198 - protein, 15 aa, Artificial sequence
  Synthetic peptide
  misc_feature: Linker H24 (AA)
REQLAEVTLSLKANS

SEQ ID NO: 199 - DNA, 60 bp, Artificial sequence
  Synthetic polynucleotide
  misc_feature: Linker H25 (PN)
cgggaacagctggcagaggtcactttgagcgtgaaagcttgtccaccctgcccgaattct

SEQ ID NO: 200 - protein, 20 aa, Artificial sequence
  Synthetic peptide
  misc_feature: Linker H25 (AA)
REQLAEVTLSLKACPPCPNS

SEQ ID NO: 201 - DNA, 45 bp, Artificial sequence
  Synthetic polynucleotide
  misc_feature: Linker H26 (PN)
cggattcaccagatgaactccgagttgagcgtgctcgcgaattct

SEQ ID NO: 202 - protein, 15 aa, Artificial sequence
  Synthetic peptide
  misc_feature: Linker H26 (AA)
RIHQMNSELSVLANS

SEQ ID NO: 203 - DNA, 60 bp, Artificial sequence
  Synthetic polynucleotide
  misc_feature: Linker H27 (PN)
cggattcaccagatgaactccgagttgagcgtgctcgcttgtccaccctgcccgaattct

SEQ ID NO: 204 - protein, 20 aa, Artificial sequence
  Synthetic peptide
  misc_feature: Linker H27 (AA)
RIHQMNSELSVLACPPCPNS

SEQ ID NO: 205 - DNA, 45 bp, Artificial sequence
  Synthetic polynucleotide
  misc_feature: Linker  H28 (PN)
gataccaaagggaagaacgtcctcgagaagatcttctcgaattct

SEQ ID NO: 206 - protein, 15 aa, Artificial sequence
  Synthetic peptide
  misc_feature: Linker H28 (AA)
DTKGKNVLEKIFSNS

SEQ ID NO: 207 - DNA, 63 bp, Artificial sequence
  Synthetic polynucleotide
  misc_feature: Linker H29 (PN)
gataccaaagggaagaacgtcctcgagaagatcttcgactcctgtccaccttgcccgaattct

SEQ ID NO: 208 - protein, 21 aa, Artificial sequence
  Synthetic peptide
  misc_feature: Linker H29 (AA)
DTKGKNVLEKIFDSCPPCPNS

SEQ ID NO: 209 - DNA, 45 bp, Artificial sequence
  Synthetic polynucleotide
  misc_feature: Linker H30 (PN)
ctgccacctgagacacaggagagtcaagaagtcaccctgaattct

SEQ ID NO: 210 - protein, 15 aa, Artificial sequence
  Synthetic peptide
  misc_feature: Linker H30 (AA)
LPPETQESQEVTLNS

SEQ ID NO: 211 - DNA, 63 bp, Artificial sequence
  Synthetic polynucleotide
  misc_feature: Linker H31 (PN)
ctgccacctgagacacaggagagtcaagaagtcaccctgtcctgtccaccttgcccgaattct

SEQ ID NO: 212 - protein, 21 aa, Artificial sequence
  Synthetic peptide
  misc_feature: Linker H31 (AA)
LPPETQESQEVTLSCPPCPNS

SEQ ID NO: 213 - DNA, 45 bp, Artificial sequence
  Synthetic polynucleotide
  misc_feature: Linker H32 (PN)
cggattcacctgaacgtgtccgagaggccctttcctccgaattct

SEQ ID NO: 214 - protein, 15 aa, Artificial sequence
  Synthetic peptide
  misc_feature: Linker H32 (AA)
RIHLNVSERPFPPNS

SEQ ID NO: 215 - DNA, 60 bp, Artificial sequence
  Synthetic polynucleotide
  misc_feature: Linker  H33 (PN)
cggattcacctgaacgtgtccgagaggccctttcctccctgtccaccctgcccgaattct

SEQ ID NO: 216 - protein, 20 aa, Artificial sequence
  Synthetic peptide
  misc_feature: Linker H33 (AA)
RIHLNVSERPFPPCPPCPNS

SEQ ID NO: 217-220 - skipped (4 entries)

SEQ ID NO: 221 - DNA, 39 bp, Artificial sequence
  Synthetic peptide
  misc_feature: Linker H36 (PN)
gggtgtccaccttgtccaggcggtggtggatcgaattct

SEQ ID NO: 222 - protein, 13 aa, Artificial sequence
  Synthetic peptide
  misc_feature: Linker H36 (AA)
GCPPCPGGGGSNS

SEQ ID NO: 223-228 - skipped (6 entries)

SEQ ID NO: 229 - DNA, 27 bp, Artificial sequence
  Synthetic polynucleotide
  misc_feature: Linker H40 (PN)
ggatgtccaccttgtcccgcgaattct

SEQ ID NO: 230 - protein, 9 aa, Artificial sequence
  Synthetic peptide
  misc_feature: Linker H40 (AA)
GCPPCPANS

SEQ ID NO: 231-236 - skipped (6 entries)

SEQ ID NO: 237 - DNA, 36 bp, Artificial sequence
  Synthetic polynucleotide
  misc_feature: Linker H44 (PN)
ggaggagctagttgtccaccttgtcccgggaattct

SEQ ID NO: 238 - protein, 12 aa, Artificial sequence
  Synthetic peptide
  misc_feature: Linker H44 (AA)
GGASCPPCPGNS

SEQ ID NO: 239 - DNA, 36 bp, Artificial sequence
  Synthetic polynucleotide
  misc_feature: Linker H45 (PN)
ggaggagccagttgtccaccttgtgccgggaattct

SEQ ID NO: 240 - protein, 12 aa, Artificial sequence
  Synthetic peptide
  misc_feature: Linker H45 (AA)
GGASCPPCAGNS

SEQ ID NO: 241 - DNA, 33 bp, Artificial sequence
  Synthetic polynucleotide
  misc_feature: Linker H46 (PN)
ggaggagccagttgtccaccttgtgcgaattct

SEQ ID NO: 242 - protein, 11 aa, Artificial sequence
  Synthetic peptide
  misc_feature: Linker H46 (AA)
GGASCPPCANS

SEQ ID NO: 243 - protein, 12 aa, Artificial sequence
  Synthetic polynucleotide
  misc_feature: Linker (G4S)2AS (AA)
GGGGSGGGGSAS

SEQ ID NO: 244 - DNA, 45 bp, Artificial sequence
  Synthetic polynucleotide
  misc_feature: Linker (G4S)3 (PN)
ggtggcggtggatccggcggaggtgggtcgggtggcggcggatct

SEQ ID NO: 245 - protein, 12 aa, Artificial sequence
  Synthetic peptide
  misc_feature: Linker (G4S)3 (AA)
GGGSGGGSGGGS

SEQ ID NO: 246 - DNA, 60 bp, Artificial sequence
  Synthetic polynucleotide
  misc_feature: Linker (G4S)4 (PN)
ggtggcggtggctcgggcggtggtggatctggaggaggtgggagcgggggaggtggcagt

SEQ ID NO: 247 - protein, 17 aa, Artificial sequence
  Synthetic peptide
  misc_feature: Linker (G4S)4 (AA)
GGGSGGGSGGGSGGGGS

SEQ ID NO: 248 - protein, 22 aa, Artificial sequence
  Synthetic peptide
  misc_feature: Linker (G4S)4AS (AA)
GGGGSGGGGSGGGGSGGGGSAS

SEQ ID NO: 249 - protein, 22 aa, Artificial sequence
  Synthetic polypeptide
  misc_feature: Anti CD28 antibody leader peptide (AA)
MDFQVQIFSFLLISASVIMSRG

SEQ ID NO: 250 - protein, 20 aa, Artificial sequence
  Synthetic polypeptide
  misc_feature: VK3 leader peptide (AA)
MEAPAQLLFLLLLWLPDTTG

SEQ ID NO: 251 - DNA, 30 bp, Artificial sequence
  Synthetic polynucleotide
  misc_feature: Heavy Chain GSP1 primer
aggtgctggaggggacagtcactgagctgc

SEQ ID NO: 252 - protein, 28 aa, Artificial sequence
  Synthetic polypeptide
GTCACWGTCACTGRCTCAGGGAARTAGC

SEQ ID NO: 253 - DNA, 33 bp, Artificial sequence
  Synthetic polynucleotide
  misc_feature: Light chain GSP1 primer
gggtgctgctcatgctgtaggtgctgtctttgc

SEQ ID NO: 254 - DNA, 32 bp, Artificial sequence
  Synthetic polynucleotide
  misc_feature: Nested light chain GSP2 primer
caagaagcacacgactgaggcacctccagatg

SEQ ID NO: 255 - DNA, 36 bp, Artificial sequence
  Synthetic polynucleotide
  misc_feature: 5' RACE abridged anchor primer
  misc_feature (24)..(25): n is a, c, g or t
  misc_feature (29)..(30): n is a, c, g or t
  misc_feature (34)..(35): n is a, c, g or t
ggccacgcgtcgactagtacgggnngggnngggnng

SEQ ID NO: 256 - DNA, 20 bp, Artificial sequence
  Synthetic primer
  misc_feature: T7 sequencing primer
gtaatacgactcactatagg

SEQ ID NO: 257 - DNA, 18 bp, Artificial sequence
  Synthetic primre
  misc_feature: M13 reverse primer
caggaaacagctatgacc

SEQ ID NO: 258 - DNA, 46 bp, Artificial sequence
  Synthetic primer
  misc_feature: PCR primer hVK3L-F3H3
gcgataaagcttgccgccatggaagcaccagcgcagcttctcttcc

SEQ ID NO: 259 - DNA, 50 bp, Artificial sequence
  Synthetic primer
  misc_feature: PCR primer hVK3L-F2
accagcgcagcttctcttcctcctgctactctggctcccagataccaccg

SEQ ID NO: 260 - DNA, 45 bp, Artificial sequence
  Synthetic primer
  misc_feature: PCR primer hVK3L-F1-2H7VL
ggctcccagataccaccggtcaaattgttctctcccagtctccag

SEQ ID NO: 261 - DNA, 35 bp, Artificial sequence
  Synthetic primer
  misc_feature: PCR primer2H7VH-NheF
gcgatagctagccaggcttatctacagcagtctgg

SEQ ID NO: 262 - DNA, 43 bp, Artificial sequence
  Synthetic primer
  misc_feature: PCR primer G4S-NheR
gcgatagctagccccacctcctccagatccaccaccgcccgag

SEQ ID NO: 263 - DNA, 35 bp, Artificial sequence
  Synthetic primer
  misc_feature: PCR primer 015VH-XhoR
gcgtactcgaggagacggtgaccgtggtccctgtg

SEQ ID NO: 264 - skipped

SEQ ID NO: 265 - DNA, 37 bp, Artificial sequence
  Synthetic primer
  misc_feature: PCR primer G1H-S-XHO
gcagtctcgagcgagcccaaatcttctgacaaaactc

SEQ ID NO: 266 - DNA, 36 bp, Artificial sequence
  Synthetic primer
  misc_feature: PCR primer CH3R-EcoR1
gcgtgagaattcttacccggagacagggagaggctc

SEQ ID NO: 267 - DNA, 32 bp, Artificial sequence
  Synthetic primer
  misc_feature: PCR primer G1-XBA-R
gcgacgtctagagtcatttacccggagacagg

SEQ ID NO: 268 - DNA, 54 bp, Artificial sequence
  Synthetic primer
  misc_feature: PCR primer G4SLinkR1-S
aattatggtggcggtggctcgggcggtggtggatctggaggaggtgggagtggg

SEQ ID NO: 269 - DNA, 54 bp, Artificial sequence
  Synthetic primer
  misc_feature: PCR primer G4SLinkR1-AS
aattcccactcccacctcctccagatccaccaccgcccgagccaccgccaccat

SEQ ID NO: 270 - DNA, 36 bp, Artificial sequence
  Synthetic primer
  misc_feature: PCR primer 2E12VLXbaR
gcgtgtctagattaacgtttgatttccagcttggtg

SEQ ID NO: 271 - DNA, 35 bp, Artificial sequence
  Synthetic primer
  misc_feature: PCR primer 2E12VLR1F
gcgatgaattctgacattgtgctcacccaatctcc

SEQ ID NO: 272 - DNA, 34 bp, Artificial sequence
  Synthetic primer
  misc_feature: PCR primer 2E12VHR1F
gcgatgaattctcaggtgcagctgaaggagtcag

SEQ ID NO: 273 - DNA, 37 bp, Artificial sequence
  Synthetic primer
  misc_feature: PCR primer 2E12VHXbaR
gcgagtctagattaagaggagacggtgactgaggttc

SEQ ID NO: 274 - DNA, 27 bp, Artificial sequence
  Synthetic primer
  misc_feature: PCR primer 2e12VHdXbaF1
gggtctggagtggctgggaatgatatg

SEQ ID NO: 275 - DNA, 28 bp, Artificial sequence
  Synthetic primer
  misc_feature: PCR primer 2e12VHdXbaR1
attcccagccactccagaccctttcctg

SEQ ID NO: 276 - DNA, 23 bp, Artificial sequence
  Synthetic primer
  misc_feature: PCR primer IgBsrG1F
gagaaccacaggtgtacaccctg

SEQ ID NO: 277 - DNA, 25 bp, Artificial sequence
  Synthetic primer
  misc_feature: PCR primer IgBsrG1R
gcagggtgtacacctgtggttctcg

SEQ ID NO: 278 - DNA, 17 bp, Artificial sequence
  Synthetic primer
  misc_feature: PCR primer M13R
caggaaacagctatgac

SEQ ID NO: 279 - DNA, 18 bp, Artificial sequence
  Synthetic primer
  misc_feature: PCR primer M13F
gtaaaacgacggccagtg

SEQ ID NO: 280 - DNA, 20 bp, Artificial sequence
  Synthetic primer
  misc_feature: PCR primer T7
gtaatacgactcactatagg

SEQ ID NO: 281 - DNA, 17 bp, Artificial sequence
  Synthetic primer
  misc_feature: PCR primer pD18F-17
aactagagaacccactg

SEQ ID NO: 282 - DNA, 20 bp, Artificial sequence
  Synthetic primer
  misc_feature: PCR primer pD18F-20
gctaactagagaacccactg

SEQ ID NO: 283 - DNA, 18 bp, Artificial sequence
  Synthetic primer
  misc_feature: PCR primer pD18F-1
atacgactcactataggg

SEQ ID NO: 284 - DNA, 19 bp, Artificial sequence
  Synthetic primer
  misc_feature: PCR primer pD18R-s
gctctagcatttaggtgac

SEQ ID NO: 285 - DNA, 18 bp, Artificial sequence
  Synthetic primer
  misc_feature: PCR primer CH3seqF1
catgaggctctgcacaac

SEQ ID NO: 286 - DNA, 18 bp, Artificial sequence
  Synthetic primer
  misc_feature: PCR primer CH3seqF2
cctctacagcaagctcac

SEQ ID NO: 287 - DNA, 19 bp, Artificial sequence
  Synthetic primer
  misc_feature: PCR primer CH3seqR1
ggttcttggtcagctcatc

SEQ ID NO: 288 - DNA, 18 bp, Artificial sequence
  Synthetic primer
  misc_feature: PCR primer CH3seqR2
gtgagcttgctgtagagg

SEQ ID NO: 289 - DNA, 51 bp, Artificial sequence
  Synthetic primer
  misc_feature: PCR primer CH3seqR2
gcgatagaattcccagatccaccaccgcccgagccaccgccaccataattc

SEQ ID NO: 290 - DNA, 36 bp, Artificial sequence
  Synthetic primer
  misc_feature: PCR primer L1-6R
gcgatagaattcccagagccaccgccaccataattc

SEQ ID NO: 291 - DNA, 45 bp, Artificial sequence
  Synthetic primer
  misc_feature: PCR primer L3R
gcgtatgaattccccgagccaccgccacccttacccggagacagg

SEQ ID NO: 292 - DNA, 49 bp, Artificial sequence
  Synthetic primer
  misc_feature: PCR primer L4R
gcgtatgaattcccagatccaccaccgcccgagccaccgccacccttac

SEQ ID NO: 293 - DNA, 44 bp, Artificial sequence
  Synthetic primer
  misc_feature: PCR primer L5R
gcgtatgaattcccgctgcctcctcccccagatccaccaccgcc

SEQ ID NO: 294 - DNA, 23 bp, Artificial sequence
  Synthetic primer
  misc_feature: PCR primer IgBsrG1F
gagaaccacaggtgtacaccctg

SEQ ID NO: 295 - DNA, 50 bp, Artificial sequence
  Synthetic primer
  misc_feature: PCR primer L-CPPCPR
gcgatagaattcggacaaggtggacaccccttacccggagacagggagag

SEQ ID NO: 296 - DNA, 40 bp, Artificial sequence
  Synthetic primer
  misc_feature: W0001F PCR primer (PN)
agataccaccggttcctcgagcgagcccaaatcttctgac

SEQ ID NO: 297 - DNA, 40 bp, Artificial sequence
  Synthetic primer
  misc_feature: W0002F PCR primer
agataccaccggttcctcgagagagcccaaatcttctgac

SEQ ID NO: 298 - DNA, 40 bp, Artificial sequence
  Synthetic primer
  misc_feature: W0003F PCR primer
agataccaccggtgcctcgagcgagcccaaatcttctgac

SEQ ID NO: 299 - DNA, 40 bp, Artificial sequence
  Synthetic primer
  misc_feature: W0004F PCR primer
agataccaccggtgcctcgagagagcccaaatcttctgac

SEQ ID NO: 300 - DNA, 40 bp, Artificial sequence
  Synthetic primer
  misc_feature: W0005F PCR primer
agataccaccggtacctcgagcgagcccaaatcttctgac

SEQ ID NO: 301 - DNA, 40 bp, Artificial sequence
  Synthetic primer
  misc_feature: W0006F PCR primer
agataccaccggtacctcgagagagcccaaatcttctgac

SEQ ID NO: 302 - DNA, 37 bp, Artificial sequence
  Synthetic primer
  misc_feature: W0007F PCR primer
agataccaccggttctctcgagcccaaatcttctgac

SEQ ID NO: 303 - DNA, 37 bp, Artificial sequence
  Synthetic primer
  misc_feature: W0008F PCR primer
agataccaccggtcagctcgagcccaaatcttctgac

SEQ ID NO: 304 - DNA, 37 bp, Artificial sequence
  Synthetic primre
  misc_feature: W0009F PCR primer
agataccaccggtgatctcgagcccaaatcttctgac

SEQ ID NO: 305 - DNA, 37 bp, Artificial sequence
  Synthetic primer
  misc_feature: W0010F PCR primer
agataccaccggtgaactcgagcccaaatcttctgac

SEQ ID NO: 306 - DNA, 37 bp, Artificial sequence
  Synthetic primer
  misc_feature: W0011F PCR primer
agataccaccggtgctctcgagcccaaatcttctgac

SEQ ID NO: 307 - DNA, 37 bp, Artificial sequence
  Synthetic primer
  misc_feature: W0012F PCR primer
agataccaccggtactctcgagcccaaatcttctgac

SEQ ID NO: 308 - DNA, 37 bp, Artificial sequence
  Synthetic primer
  misc_feature: 12 HL XbaR PCR primer
gcgatatctagattaacgtttgatttccagcttggtg

SEQ ID NO: 309 - DNA, 41 bp, Artificial sequence
  Synthetic primer
  misc_feature: CD37 binding domain primer G281LH-NheR
actgctgcagctggaccgcgctagctccgccgccacccgac

SEQ ID NO: 310 - DNA, 40 bp, Artificial sequence
  Synthetic primer
  misc_feature: CD37 binding domain primer G281LH-NheF
ggcggagctagcgcggtccagctgcagcagtctggacctg

SEQ ID NO: 311 - DNA, 37 bp, Artificial sequence
  Synthetic primer
  misc_feature: CD37 binding domain primer G281-LH-LPinF
gcgatcaccggtgacatccagatgactcagtctccag

SEQ ID NO: 312 - DNA, 37 bp, Artificial sequence
  Synthetic primer
  misc_feature: CD37 binding domain primer G281-LH-HXhoR
gcgatactcgaggagacggtgactgaggttccttgac

SEQ ID NO: 313 - DNA, 38 bp, Artificial sequence
  Synthetic primer
  misc_feature: CD37 binding domain primer G281-LH-LEcoF
gcgatcgaattcagacatccagatgactcagtctccag

SEQ ID NO: 314 - DNA, 43 bp, Artificial sequence
  Synthetic primer
  misc_feature: CD37 binding domain primer G281-LH-HXbaR
gcgattctagattaggaagagacggtgactgaggttccttgac

SEQ ID NO: 315 - DNA, 37 bp, Artificial sequence
  Synthetic primer
  misc_feature: CD37 binding domain primer G281-HL-HF
gcgataaccggtgcggtccagctgcagcagtctggac

SEQ ID NO: 316 - DNA, 52 bp, Artificial sequence
  Synthetic primer
  misc_feature: CD37 binding domain primer G281-HL-HR3
gacccaccaccgcccgagccaccgccaccagaagagacggtgactgaggttc

SEQ ID NO: 317 - DNA, 49 bp, Artificial sequence
  Synthetic primer
  misc_feature: CD37 binding domain primer G281-HL-HR2
actcccgcctcctcctgatccgccgccacccgacccaccaccgcccgag

SEQ ID NO: 318 - DNA, 42 bp, Artificial sequence
  Synthetic primer
  misc_feature: CD37 binding domain primer G281-HL-HNheR
gagtcatctggatgtcgctagcactcccgcctcctcctgatc

SEQ ID NO: 319 - DNA, 45 bp, Artificial sequence
  Synthetic primer
  misc_feature: CD37 binding domain primer G281-HL-LNheF
atcaggaggaggcgggagtgctagcgacatccagatgactcagtc

SEQ ID NO: 320 - DNA, 37 bp, Artificial sequence
  Synthetic primer
  misc_feature: CD37 binding domain primer G281-HL-LXhoR
gcgatactcgagcctttgatctccagttcggtgcctc

SEQ ID NO: 321 - DNA, 42 bp, Artificial sequence
  Synthetic primer
  misc_feature: CD37 binding domain primer G281-HL-LXbaR
gcgatatctagactcaacctttgatctccagttcggtgcctc

SEQ ID NO: 322 - DNA, 37 bp, Artificial sequence
  Synthetic primer
  misc_feature: CD37 binding domain primer G281-HL-EcoF
gcgatagaattcgcggtccagctgcagcagtctggac

SEQ ID NO: 323 - DNA, 40 bp, Artificial sequence
  Synthetic primer
  misc_feature: CD3 binding domain primer (G19-4 temp.) 194-LH-LF1
gcgtatgaaccggtgacatccagatgacacagactacatc

SEQ ID NO: 324 - DNA, 50 bp, Artificial sequence
  Synthetic primer
  misc_feature: CD3 binding domain primer (G19-4 temp.) 194-LF2
atccagatgacacagactacatcctccctgtctgcctctctgggagacag

SEQ ID NO: 325 - DNA, 52 bp, Artificial sequence
  Synthetic primer
  misc_feature: CD3 binding domain primer (G19-4 temp.) 194-LF3
gtctgcctctctgggagacagagtcaccatcagttgcagggcaagtcaggac

SEQ ID NO: 326 - DNA, 50 bp, Artificial sequence
  Synthetic primer
  misc_feature: CD3 binding domain primer (G19-4 temp.) 194-LF4
gttgcagggcaagtcaggacattcgcaattatttaaactggtatcagcag

SEQ ID NO: 327 - DNA, 50 bp, Artificial sequence
  Synthetic primer
  misc_feature: CD3 binding domain primer (G19-4 temp.) 194-LF5
atttaaactggtatcagcagaaaccagatggaactgttaaactcctgatc

SEQ ID NO: 328 - DNA, 50 bp, Artificial sequence
  Synthetic primer
  misc_feature: CD3 binding domain primer (G19-4 temp.) 194-LF6
gaactgttaaactcctgatctactacacatcaagattacactcaggagtc

SEQ ID NO: 329 - DNA, 52 bp, Artificial sequence
  Synthetic primer
  misc_feature: CD3 binding domain primer (G19-4 temp.) 194-LF7
caagattacactcaggagtcccatcaaggttcagtggcagtgggtctggaac

SEQ ID NO: 330 - DNA, 52 bp, Artificial sequence
  Synthetic primer
  misc_feature: CD3 binding domain primer (G19-4 temp.) 194-LR7
caggttggcaatggtgagagaataatctgttccagacccactgccactgaac

SEQ ID NO: 331 - DNA, 50 bp, Artificial sequence
  Synthetic primer
  misc_feature: CD3 binding domain primer (G19-4 temp.) 194-LR6
gcaaaagtaagtggcaatatcttctggttgcaggttggcaatggtgagag

SEQ ID NO: 332 - DNA, 51 bp, Artificial sequence
  Synthetic primer
  misc_feature: CD3 binding domain primer (G19-4 temp.) 194-LR5
gaacgtccacggaagcgtattaccctgttggcaaaagtaagtggcaatatc

SEQ ID NO: 333 - DNA, 52 bp, Artificial sequence
  Synthetic primer
  misc_feature: CD3 binding domain primer (G19-4 temp.) 194-LR4
cgtttggttaccagtttggtgcctccaccgaacgtccacggaagcgtattac

SEQ ID NO: 334 - DNA, 46 bp, Artificial sequence
  Synthetic primer
  misc_feature: CD3 binding domain primer (G19-4 temp.) 194-LR3
accaccgcccgagccaccgccaccccgtttggttaccagtttggtg

SEQ ID NO: 335 - DNA, 50 bp, Artificial sequence
  Synthetic primre
  misc_feature: CD3 binding domain primer (G19-4 temp.) 194-LR2
gctagcgctcccacctcctccagatccaccaccgcccgagccaccgccac

SEQ ID NO: 336 - DNA, 42 bp, Artificial sequence
  Synthetic primer
  misc_feature: CD3 binding domain primer (G19-4 temp.) 194-LH-LR1
gttgcagctggacctcgctagcgctcccacctcctccagatc

SEQ ID NO: 337 - DNA, 54 bp, Artificial sequence
  Synthetic primer
  misc_feature: CD3 binding domain primer (G19-4 temp.) 194-LH-HF1
gatctggaggaggtgggagcgctagcgaggtccagctgcaacagtctggacctg

SEQ ID NO: 338 - DNA, 50 bp, Artificial sequence
  Synthetic primer
  misc_feature: CD3 binding domain primer (G19-4 temp.) 194-HF2
agctgcaacagtctggacctgaactggtgaagcctggagcttcaatgaag

SEQ ID NO: 339 - DNA, 50 bp, Artificial sequence
  Synthetic primer
  misc_feature: CD3 binding domain primer (G19-4 temp.) 194-HF3
agcctggagcttcaatgaagatttcctgcaaggcctctggttactcattc

SEQ ID NO: 340 - DNA, 53 bp, Artificial sequence
  Synthetic primer
  misc_feature: CD3 binding domain primer (G19-4 temp.) 194-HF4
gcaaggcctctggttactcattcactggctacatcgtgaactggctgaagcag

SEQ ID NO: 341 - DNA, 52 bp, Artificial sequence
  Synthetic primer
  misc_feature: CD3 binding domain primer (G19-4 temp.) 194-HF5
atcgtgaactggctgaagcagagccatggaaagaaccttgagtggattggac

SEQ ID NO: 342 - DNA, 52 bp, Artificial sequence
  Synthetic primer
  misc_feature: CD3 binding domain primer (G19-4 temp.) 194-HF6
gaaccttgagtggattggacttattaatccatacaaaggtcttactacctac

SEQ ID NO: 343 - DNA, 52 bp, Artificial sequence
  Synthetic primer
  misc_feature: CD3 binding domain primer (G19-4 temp.) 194-HR6
aatgtggccttgcccttgaatttctggttgtaggtagtaagacctttgtatg

SEQ ID NO: 344 - DNA, 52 bp, Artificial sequence
  Synthetic primer
  misc_feature: CD3 binding domain primer (G19-4 temp.) 194-HR5
catgtaggctgtgctggatgacttgtctacagttaatgtggccttgcccttg

SEQ ID NO: 345 - DNA, 55 bp, Artificial sequence
  Synthetic primer
  misc_feature: CD3 binding domain primer (G19-4 temp.) 194-HR4
actgcagagtcttcagatgtcagactgaggagctccatgtaggctgtgctggatg

SEQ ID NO: 346 - DNA, 52 bp, Artificial sequence
  Synthetic primer
  misc_feature: CD3 binding domain primer (G19-4 temp.) 194-HR3
accatagtacccagatcttgcacagtaatagactgcagagtcttcagatgtc

SEQ ID NO: 347 - DNA, 52 bp, Artificial sequence
  Synthetic primer
  misc_feature: CD3 binding domain primer (G19-4 temp.) 194-HR2
gcgccccagacatcgaagtaccagtccgagtcaccatagtacccagatcttg

SEQ ID NO: 348 - DNA, 52 bp, Artificial sequence
  Synthetic primer
  misc_feature: CD3 binding domain primer (G19-4 temp.) 194-LH-HR1
gcgaatactcgaggagacggtgaccgtggtccctgcgccccagacatcgaag

SEQ ID NO: 349 - DNA, 42 bp, Artificial sequence
  Synthetic primer
  misc_feature: CD3 binding domain primer (G19-4 temp.) 194-HL-HF1
gcgtatgaaccggtgaggtccagctgcaacagtctggacctg

SEQ ID NO: 350 - DNA, 55 bp, Artificial sequence
  Synthetic primer
  misc_feature: CD3 binding domain primer (G19-4 temp.) 194-HL-HR1
accgccaccagaggagacggtgaccgtggtccctgcgccccagacatcgaagtac

SEQ ID NO: 351 - DNA, 52 bp, Artificial sequence
  Synthetic primer
  misc_feature: CD3 binding domain primer (G19-4 temp.) 194-HL-HR0
acctcctccagatccaccaccgcccgagccaccgccaccagaggagacggtg

SEQ ID NO: 352 - DNA, 49 bp, Artificial sequence
  Synthetic primer
  misc_feature: CD3 binding domain primer (G19-4 temp.) 194-HL-LF1
gcgggggaggtggcagtgctagcgacatccagatgacacagactacatc

SEQ ID NO: 353 - DNA, 34 bp, Artificial sequence
  Synthetic primer
  misc_feature: CD3 binding domain primer (G19-4 temp.) 194-HL-LR3Xho
gcgaatactcgagcgtttggttaccagtttggtg

SEQ ID NO: 354 - DNA, 37 bp, Artificial sequence
  Synthetic primer
  misc_feature: CD3 binding domain primer (G19-4 temp.) 194-HL-LR3Xba
gcgatatctagattaccgtttggttaccagtttggtg

SEQ ID NO: 355 - DNA, 43 bp, Artificial sequence
  Synthetic primer
  misc_feature: CD3 binding domain primer (G19-4 temp.) 194-HL-HF1R1
gcgtatgagaattcagaggtccagctgcaacagtctggacctg

SEQ ID NO: 356 - DNA, 41 bp, Artificial sequence
  Synthetic primer
  misc_feature: CD3 binding domain primer (G19-4 temp.) 194-LH-LF1R1
gcgtatgagaattctgacatccagatgacacagactacatc

SEQ ID NO: 357 - DNA, 41 bp, Artificial sequence; identical to SEQ ID NO: 356
  Synthetic primer
  misc_feature: CD3 binding domain primer (G19-4 temp.) 194-LH-HR1Xba

SEQ ID NO: 358 - DNA, 1551 bp, Artificial sequence
  Synthetic polynucleotide
  misc_feature: PIMS - W0001 (PN)
  misc_feature (1)..(60): Human VK3 leader
  misc_feature (61)..(69): Leader-hinge junctions
  misc_feature (70)..(114): Hinge region
  misc_feature (115)..(765): CH2CH3 region
  misc_feature (766)..(789): Linker peptide
  misc_feature (790)..(1551): Binding domain
  misc_feature (1153)..(1212): Binding region linker
atggaagcaccagcgcagcttctcttcctcctgctactctggctcccagataccaccggtgcctcgagcgagcccaaatcttgtgacaaaactcacacatgtccaccgtgcccagcacctgaactcctgggtggaccgtcagtcttcctcttccccccaaaacccaaggacaccctcatgatctcccggacccctgaggtcacatgcgtggtggtggacgtgagccacgaagaccctgaggtcaagttcaactggtacgtggacggcgtggaggtgcataatgccaagacaaagccgcgggaggagcagtacaacagcacgtaccgtgtggtcagcgtcctcaccgtcctgcaccaggactggctgaatggcaaggagtacaagtgcaaggtctccaacaaagccctcccagcccccatcgagaaaaccatctccaaagccaaagggcagccccgagaaccacaggtgtacaccctgcccccatcccgggatgagctgaccaagaaccaggtcagcctgacctgcctggtcaaaggcttctatccaagcgacatcgccgtggagtgggagagcaatgggcagccggagaacaactacaagaccacgcctcccgtgctggactccgacggctccttcttcctctacagcaagctcaccgtggacaagagcaggtggcagcaggggaacgtcttctcatgctccgtgatgcatgaggctctgcacaaccactacacgcagaagagcctctccctgtctccgggtaaagggtgtccaccttgtccgaattctcaggtgcagctgaaggagtcagggcctggcagcgtggcgccctcacagagcctgtccatcacatgcaccgtctcagggttctcattaaccggctatggtgtaaactgggttcgccagcctccaggaaagggtctggagtggctgggaatgatatggggtgatggaagcacagactataattcagctctcaaatccagactatcgatcaccaaggacaactccaagagccaagttttcttaaaaatgaacagtctgcaaactgatgacacagccagatactactgtgctcgagatggttatagtaactttcattactatgttatggactactggggtcaaggaacctcagtcaccgtctcctctgggggtggaggctctggtggcggtggatccggcggaggtgggtcgggtggcggcggatctgacattgtgctcacccaatctccagcttctttggctgtgtctctaggtcagagagccaccatctcctgcagagccagtgaaagtgttgaatattatgtcacaagtttaatgcagtggtaccaacagaaaccaggacagccacccaagctcctcatctctgctgctagcaacgtagaatctggggtccctgccaggtttagtggcagtgggtctgggacagactttagcctcaacatccatcctgtggaggaggatgatattgcaatgtatttctgtcagcaaagtaggaaggttccatggacgttcggtggaggcaccaagctggaaatcaaacgttaa

SEQ ID NO: 359 - protein, 516 aa, Artificial sequence
  Synthetic polypeptide
  misc_feature: PIMS - W0001 (AA)
  misc_feature (1)..(20): VK3 leader
  misc_feature (21)..(23): Leader-hinge junction
  misc_feature (24)..(38): Hinge region
  misc_feature (39)..(255): CH2CH3 region
  misc_feature (264)..(516): Binding domain
  misc_feature (385)..(404): Binding region linker
MEAPAQLLFLLLLWLPDTTGSSSEPKSSDKTHTCPPCPAPELLGGPSVFLFPPKPKDTLMISRTPEVTCVVVDVSHEDPEVKFNWYVDGVEVHNAKTKPREEQYNSTYRVVSVLTVLHQDWLNGKEYKCKVSNKALPAPIEKTISKAKGQPREPQVYTLPPSRDELTKNQVSLTCLVKGFYPSDIAVEWESNGQPENNYKTTPPVLDSDGSFFLYSKLTVDKSRWQQGNVFSCSVMHEALHNHYTQKSLSLSPGKGCPPCPNSQVQLKESGPGSVAPSQSLSITCTVSGFSLTGYGVNWVRQPPGKGLEWLGMIWGDGSTDYNSALKSRLSITKDNSKSQVFLKMNSLQTDDTARYYCARDGYSNFHYYVMDYWGQGTSVTVSSGGGGSGGGGSGGGGSGGGGSDIVLTQSPASLAVSLGQRATISCRASESVEYYVTSLMQWYQQKPGQPPKLLISAASNVESGVPARFSGSGSGTDFSLNIHPVEEDDIAMYFCQQSRKVPWTFGGGTKLEIKR

SEQ ID NO: 360 - DNA, 1551 bp, Artificial sequence
  Synthetic polynucleotide
  misc_feature: PIMS - W0002 (PN)
  misc_feature (1)..(60): Human VK3 leader
  misc_feature (61)..(69): Leader-hinger junction
  misc_feature (70)..(114): Hinge region
  misc_feature (115)..(765): CH2CH3 region
  misc_feature (766)..(789): Linker peptide
  misc_feature (790)..(1551): Binding domain
  misc_feature (1153)..(1212): Binding region linker
atggaagcaccagcgcagcttctcttcctcctgctactctggctcccagataccaccggttcctcgagagagcccaaatcttgtgacaaaactcacacatgtccaccgtgcccagcacctgaactcctgggtggaccgtcagtcttcctcttccccccaaaacccaaggacaccctcatgatctcccggacccctgaggtcacatgcgtggtggtggacgtgagccacgaagaccctgaggtcaagttcaactggtacgtggacggcgtggaggtgcataatgccaagacaaagccgcgggaggagcagtacaacagcacgtaccgtgtggtcagcgtcctcaccgtcctgcaccaggactggctgaatggcaaggagtacaagtgcaaggtctccaacaaagccctcccagcccccatcgagaaaaccatctccaaagccaaagggcagccccgagaaccacaggtgtacaccctgcccccatcccgggatgagctgaccaagaaccaggtcagcctgacctgcctggtcaaaggcttctatccaagcgacatcgccgtggagtgggagagcaatgggcagccggagaacaactacaagaccacgcctcccgtgctggactccgacggctccttcttcctctacagcaagctcaccgtggacaagagcaggtggcagcaggggaacgtcttctcatgctccgtgatgcatgaggctctgcacaaccactacacgcagaagagcctctccctgtctccgggtaaagggtgtccaccttgtccgaattctcaggtgcagctgaaggagtcagggcctggcagcgtggcgccctcacagagcctgtccatcacatgcaccgtctcagggttctcattaaccggctatggtgtaaactgggttcgccagcctccaggaaagggtctggagtggctgggaatgatatggggtgatggaagcacagactataattcagctctcaaatccagactatcgatcaccaaggacaactccaagagccaagttttcttaaaaatgaacagtctgcaaactgatgacacagccagatactactgtgctcgagatggttatagtaactttcattactatgttatggactactggggtcaaggaacctcagtcaccgtctcctctgggggtggaggctctggtggcggtggatccggcggaggtgggtcgggtggcggcggatctgacattgtgctcacccaatctccagcttctttggctgtgtctctaggtcagagagccaccatctcctgcagagccagtgaaagtgttgaatattatgtcacaagtttaatgcagtggtaccaacagaaaccaggacagccacccaagctcctcatctctgctgctagcaacgtagaatctggggtccctgccaggtttagtggcagtgggtctgggacagactttagcctcaacatccatcctgtggaggaggatgatattgcaatgtatttctgtcagcaaagtaggaaggttccatggacgttcggtggaggcaccaagctggaaatcaaacgttaa

SEQ ID NO: 361 - protein, 516 aa, Artificial sequence
  Synthetic polypeptide
  misc_feature: PIMS - W0002 (AA)
  misc_feature (1)..(20): Human VK3 leader
  misc_feature (21)..(23): Leader-hinge junction
  misc_feature (24)..(38): Hinge region
  misc_feature (39)..(255): CH2CH3 region
  misc_feature (256)..(262): Linker peptide
  misc_feature (263)..(516): Binding domain
  misc_feature (385)..(404): Binding region linker
MEAPAQLLFLLLLWLPDTTGSSREPKSSDKTHTCPPCPAPELLGGPSVFLFPPKPKDTLMISRTPEVTCVVVDVSHEDPEVKFNWYVDGVEVHNAKTKPREEQYNSTYRVVSVLTVLHQDWLNGKEYKCKVSNKALPAPIEKTISKAKGQPREPQVYTLPPSRDELTKNQVSLTCLVKGFYPSDIAVEWESNGQPENNYKTTPPVLDSDGSFFLYSKLTVDKSRWQQGNVFSCSVMHEALHNHYTQKSLSLSPGKGCPPCPNSQVQLKESGPGSVAPSQSLSITCTVSGFSLTGYGVNWVRQPPGKGLEWLGMIWGDGSTDYNSALKSRLSITKDNSKSQVFLKMNSLQTDDTARYYCARDGYSNFHYYVMDYWGQGTSVTVSSGGGGSGGGGSGGGGSGGGGSDIVLTQSPASLAVSLGQRATISCRASESVEYYVTSLMQWYQQKPGQPPKLLISAASNVESGVPARFSGSGSGTDFSLNIHPVEEDDIAMYFCQQSRKVPWTFGGGTKLEIKR

SEQ ID NO: 362 - DNA, 1551 bp, Artificial sequence; identical to SEQ ID NO: 358
  Synthetic polynucleotide
  misc_feature: PIMS - W0003 (PN)
  misc_feature (1)..(60): Human VK3 leader
  misc_feature (61)..(69): Leader-hinge junction
  misc_feature (70)..(114): Hinge region
  misc_feature (115)..(765): CH2CH3 region
  misc_feature (766)..(789): Linker peptide
  misc_feature (790)..(1551): Binding domain
  misc_feature (1153)..(1212): Binding region linker

SEQ ID NO: 363 - protein, 516 aa, Artificial sequence
  Synthetic polypeptide
  misc_feature: PIMS - W0003 (AA)
  misc_feature (1)..(20): Human VK3 leader
  misc_feature (21)..(23): Leader-hinge junction
  misc_feature (24)..(38): Hinge region
  misc_feature (39)..(255): CH2CH3 region
  misc_feature (256)..(263): Linker peptide
  misc_feature (264)..(516): Binding domain
  misc_feature (385)..(404): Binding region linker
MEAPAQLLFLLLLWLPDTTGASSEPKSSDKTHTCPPCPAPELLGGPSVFLFPPKPKDTLMISRTPEVTCVVVDVSHEDPEVKFNWYVDGVEVHNAKTKPREEQYNSTYRVVSVLTVLHQDWLNGKEYKCKVSNKALPAPIEKTISKAKGQPREPQVYTLPPSRDELTKNQVSLTCLVKGFYPSDIAVEWESNGQPENNYKTTPPVLDSDGSFFLYSKLTVDKSRWQQGNVFSCSVMHEALHNHYTQKSLSLSPGKGCPPCPNSQVQLKESGPGSVAPSQSLSITCTVSGFSLTGYGVNWVRQPPGKGLEWLGMIWGDGSTDYNSALKSRLSITKDNSKSQVFLKMNSLQTDDTARYYCARDGYSNFHYYVMDYWGQGTSVTVSSGGGGSGGGGSGGGGSGGGGSDIVLTQSPASLAVSLGQRATISCRASESVEYYVTSLMQWYQQKPGQPPKLLISAASNVESGVPARFSGSGSGTDFSLNIHPVEEDDIAMYFCQQSRKVPWTFGGGTKLEIKR

SEQ ID NO: 364 - DNA, 1551 bp, Artificial sequence
  Synthetic polynucleotide
  misc_feature: PIMS - W0004 (PN)
  misc_feature (1)..(60): Human VK3 leader
  misc_feature (61)..(69): Leader-hinge junction
  misc_feature (70)..(114): Hinge region
  misc_feature (115)..(765): CH2CH3 region
  misc_feature (766)..(789): Linker peptide
  misc_feature (790)..(1551): Binding domain
  misc_feature (1153)..(1212): Binding region linker
atggaagcaccagcgcagcttctcttcctcctgctactctggctcccagataccaccggtgcctcgagagagcccaaatcttgtgacaaaactcacacatgtccaccgtgcccagcacctgaactcctgggtggaccgtcagtcttcctcttccccccaaaacccaaggacaccctcatgatctcccggacccctgaggtcacatgcgtggtggtggacgtgagccacgaagaccctgaggtcaagttcaactggtacgtggacggcgtggaggtgcataatgccaagacaaagccgcgggaggagcagtacaacagcacgtaccgtgtggtcagcgtcctcaccgtcctgcaccaggactggctgaatggcaaggagtacaagtgcaaggtctccaacaaagccctcccagcccccatcgagaaaaccatctccaaagccaaagggcagccccgagaaccacaggtgtacaccctgcccccatcccgggatgagctgaccaagaaccaggtcagcctgacctgcctggtcaaaggcttctatccaagcgacatcgccgtggagtgggagagcaatgggcagccggagaacaactacaagaccacgcctcccgtgctggactccgacggctccttcttcctctacagcaagctcaccgtggacaagagcaggtggcagcaggggaacgtcttctcatgctccgtgatgcatgaggctctgcacaaccactacacgcagaagagcctctccctgtctccgggtaaagggtgtccaccttgtccgaattctcaggtgcagctgaaggagtcagggcctggcagcgtggcgccctcacagagcctgtccatcacatgcaccgtctcagggttctcattaaccggctatggtgtaaactgggttcgccagcctccaggaaagggtctggagtggctgggaatgatatggggtgatggaagcacagactataattcagctctcaaatccagactatcgatcaccaaggacaactccaagagccaagttttcttaaaaatgaacagtctgcaaactgatgacacagccagatactactgtgctcgagatggttatagtaactttcattactatgttatggactactggggtcaaggaacctcagtcaccgtctcctctgggggtggaggctctggtggcggtggatccggcggaggtgggtcgggtggcggcggatctgacattgtgctcacccaatctccagcttctttggctgtgtctctaggtcagagagccaccatctcctgcagagccagtgaaagtgttgaatattatgtcacaagtttaatgcagtggtaccaacagaaaccaggacagccacccaagctcctcatctctgctgctagcaacgtagaatctggggtccctgccaggtttagtggcagtgggtctgggacagactttagcctcaacatccatcctgtggaggaggatgatattgcaatgtatttctgtcagcaaagtaggaaggttccatggacgttcggtggaggcaccaagctggaaatcaaacgttaa

SEQ ID NO: 365 - protein, 516 aa, Artificial sequence
  Synthetic polypeptide
  misc_feature: PIMS - W0004 (AA)
  misc_feature (1)..(20): Human VK3 leader
  misc_feature (21)..(23): Leader-hinge junction
  misc_feature (24)..(38): Hinge region
  misc_feature (39)..(255): CH2CH3 region
  misc_feature (256)..(263): Linker peptide
  misc_feature (264)..(516): Binding domain
  misc_feature (385)..(404): Binding region linker
MEAPAQLLFLLLLWLPDTTGASREPKSSDKTHTCPPCPAPELLGGPSVFLFPPKPKDTLMISRTPEVTCVVVDVSHEDPEVKFNWYVDGVEVHNAKTKPREEQYNSTYRVVSVLTVLHQDWLNGKEYKCKVSNKALPAPIEKTISKAKGQPREPQVYTLPPSRDELTKNQVSLTCLVKGFYPSDIAVEWESNGQPENNYKTTPPVLDSDGSFFLYSKLTVDKSRWQQGNVFSCSVMHEALHNHYTQKSLSLSPGKGCPPCPNSQVQLKESGPGSVAPSQSLSITCTVSGFSLTGYGVNWVRQPPGKGLEWLGMIWGDGSTDYNSALKSRLSITKDNSKSQVFLKMNSLQTDDTARYYCARDGYSNFHYYVMDYWGQGTSVTVSSGGGGSGGGGSGGGGSGGGGSDIVLTQSPASLAVSLGQRATISCRASESVEYYVTSLMQWYQQKPGQPPKLLISAASNVESGVPARFSGSGSGTDFSLNIHPVEEDDIAMYFCQQSRKVPWTFGGGTKLEIKR

SEQ ID NO: 366 - DNA, 1551 bp, Artificial sequence
  Synthetic polynucleotide
  misc_feature: PIMS - W0005 (PN)
  misc_feature (1)..(60): Human VK3 leader
  misc_feature (61)..(69): Leader-hinge junction
  misc_feature (70)..(114): Hinge region
  misc_feature (115)..(765): CH2CH3 region
  misc_feature (766)..(789): Linker peptide
  misc_feature (790)..(1551): Binding domain
  misc_feature (1153)..(1212): Binding region linker
atggaagcaccagcgcagcttctcttcctcctgctactctggctcccagataccaccggtacctcgagagagcccaaatcttgtgacaaaactcacacatgtccaccgtgcccagcacctgaactcctgggtggaccgtcagtcttcctcttccccccaaaacccaaggacaccctcatgatctcccggacccctgaggtcacatgcgtggtggtggacgtgagccacgaagaccctgaggtcaagttcaactggtacgtggacggcgtggaggtgcataatgccaagacaaagccgcgggaggagcagtacaacagcacgtaccgtgtggtcagcgtcctcaccgtcctgcaccaggactggctgaatggcaaggagtacaagtgcaaggtctccaacaaagccctcccagcccccatcgagaaaaccatctccaaagccaaagggcagccccgagaaccacaggtgtacaccctgcccccatcccgggatgagctgaccaagaaccaggtcagcctgacctgcctggtcaaaggcttctatccaagcgacatcgccgtggagtgggagagcaatgggcagccggagaacaactacaagaccacgcctcccgtgctggactccgacggctccttcttcctctacagcaagctcaccgtggacaagagcaggtggcagcaggggaacgtcttctcatgctccgtgatgcatgaggctctgcacaaccactacacgcagaagagcctctccctgtctccgggtaaagggtgtccaccttgtccgaattctcaggtgcagctgaaggagtcagggcctggcagcgtggcgccctcacagagcctgtccatcacatgcaccgtctcagggttctcattaaccggctatggtgtaaactgggttcgccagcctccaggaaagggtctggagtggctgggaatgatatggggtgatggaagcacagactataattcagctctcaaatccagactatcgatcaccaaggacaactccaagagccaagttttcttaaaaatgaacagtctgcaaactgatgacacagccagatactactgtgctcgagatggttatagtaactttcattactatgttatggactactggggtcaaggaacctcagtcaccgtctcctctgggggtggaggctctggtggcggtggatccggcggaggtgggtcgggtggcggcggatctgacattgtgctcacccaatctccagcttctttggctgtgtctctaggtcagagagccaccatctcctgcagagccagtgaaagtgttgaatattatgtcacaagtttaatgcagtggtaccaacagaaaccaggacagccacccaagctcctcatctctgctgctagcaacgtagaatctggggtccctgccaggtttagtggcagtgggtctgggacagactttagcctcaacatccatcctgtggaggaggatgatattgcaatgtatttctgtcagcaaagtaggaaggttccatggacgttcggtggaggcaccaagctggaaatcaaacgttaa

SEQ ID NO: 367 - protein, 516 aa, Artificial sequence
  Synthetic polypeptide
  misc_feature: PIMS - W0005 (AA)
  misc_feature (1)..(20): Human VK3 leader
  misc_feature (21)..(23): Leader-hinge junction
  misc_feature (24)..(38): Hinge region
  misc_feature (39)..(255): CH2CH3 region
  misc_feature (256)..(263): Linker peptide
  misc_feature (264)..(516): Binding domain
  misc_feature (385)..(404): Binding domain
MEAPAQLLFLLLLWLPDTTGTSREPKSSDKTHTCPPCPAPELLGGPSVFLFPPKPKDTLMISRTPEVTCVVVDVSHEDPEVKFNWYVDGVEVHNAKTKPREEQYNSTYRVVSVLTVLHQDWLNGKEYKCKVSNKALPAPIEKTISKAKGQPREPQVYTLPPSRDELTKNQVSLTCLVKGFYPSDIAVEWESNGQPENNYKTTPPVLDSDGSFFLYSKLTVDKSRWQQGNVFSCSVMHEALHNHYTQKSLSLSPGKGCPPCPNSQVQLKESGPGSVAPSQSLSITCTVSGFSLTGYGVNWVRQPPGKGLEWLGMIWGDGSTDYNSALKSRLSITKDNSKSQVFLKMNSLQTDDTARYYCARDGYSNFHYYVMDYWGQGTSVTVSSGGGGSGGGGSGGGGSGGGGSDIVLTQSPASLAVSLGQRATISCRASESVEYYVTSLMQWYQQKPGQPPKLLISAASNVESGVPARFSGSGSGTDFSLNIHPVEEDDIAMYFCQQSRKVPWTFGGGTKLEIKR

SEQ ID NO: 368 - DNA, 1548 bp, Artificial sequence
  Synthetic polynucleotide
  misc_feature: PIMS - W0006 (PN)
  misc_feature (1)..(60): Human VK3 leader
  misc_feature (61)..(69): Leader-hinge junction
  misc_feature (70)..(114): Hinge region
  misc_feature (115)..(765): CH2CH3 region
  misc_feature (766)..(789): Linker peptide
  misc_feature (790)..(1551): Binding domain
  misc_feature (1153)..(1212): Binding region linker
atggaagcaccagcgcagcttctcttcctcctgctactctggctcccagataccaccggttctctcgagcccaaatcttgtgacaaaactcacacatgtccaccgtgcccagcacctgaactcctgggtggaccgtcagtcttcctcttccccccaaaacccaaggacaccctcatgatctcccggacccctgaggtcacatgcgtggtggtggacgtgagccacgaagaccctgaggtcaagttcaactggtacgtggacggcgtggaggtgcataatgccaagacaaagccgcgggaggagcagtacaacagcacgtaccgtgtggtcagcgtcctcaccgtcctgcaccaggactggctgaatggcaaggagtacaagtgcaaggtctccaacaaagccctcccagcccccatcgagaaaaccatctccaaagccaaagggcagccccgagaaccacaggtgtacaccctgcccccatcccgggatgagctgaccaagaaccaggtcagcctgacctgcctggtcaaaggcttctatccaagcgacatcgccgtggagtgggagagcaatgggcagccggagaacaactacaagaccacgcctcccgtgctggactccgacggctccttcttcctctacagcaagctcaccgtggacaagagcaggtggcagcaggggaacgtcttctcatgctccgtgatgcatgaggctctgcacaaccactacacgcagaagagcctctccctgtctccgggtaaagggtgtccaccttgtccgaattctcaggtgcagctgaaggagtcagggcctggcagcgtggcgccctcacagagcctgtccatcacatgcaccgtctcagggttctcattaaccggctatggtgtaaactgggttcgccagcctccaggaaagggtctggagtggctgggaatgatatggggtgatggaagcacagactataattcagctctcaaatccagactatcgatcaccaaggacaactccaagagccaagttttcttaaaaatgaacagtctgcaaactgatgacacagccagatactactgtgctcgagatggttatagtaactttcattactatgttatggactactggggtcaaggaacctcagtcaccgtctcctctgggggtggaggctctggtggcggtggatccggcggaggtgggtcgggtggcggcggatctgacattgtgctcacccaatctccagcttctttggctgtgtctctaggtcagagagccaccatctcctgcagagccagtgaaagtgttgaatattatgtcacaagtttaatgcagtggtaccaacagaaaccaggacagccacccaagctcctcatctctgctgctagcaacgtagaatctggggtccctgccaggtttagtggcagtgggtctgggacagactttagcctcaacatccatcctgtggaggaggatgatattgcaatgtatttctgtcagcaaagtaggaaggttccatggacgttcggtggaggcaccaagctggaaatcaaacgttaa

SEQ ID NO: 369 - protein, 515 aa, Artificial sequence
  Synthetic polypeptide
  misc_feature: PIMS - W0006 (AA)
  misc_feature (1)..(20): Human VK3 leader
  misc_feature (21)..(23): Leader-hinge junction
  misc_feature (24)..(38): Hinge region
  misc_feature (39)..(255): CH2CH3 region
  misc_feature (256)..(263): Linker peptide
  misc_feature (264)..(516): Binding domain
  misc_feature (385)..(404): Binding region linker
MEAPAQLLFLLLLWLPDTTGSLEPKSSDKTHTCPPCPAPELLGGPSVFLFPPKPKDTLMISRTPEVTCVVVDVSHEDPEVKFNWYVDGVEVHNAKTKPREEQYNSTYRVVSVLTVLHQDWLNGKEYKCKVSNKALPAPIEKTISKAKGQPREPQVYTLPPSRDELTKNQVSLTCLVKGFYPSDIAVEWESNGQPENNYKTTPPVLDSDGSFFLYSKLTVDKSRWQQGNVFSCSVMHEALHNHYTQKSLSLSPGKGCPPCPNSQVQLKESGPGSVAPSQSLSITCTVSGFSLTGYGVNWVRQPPGKGLEWLGMIWGDGSTDYNSALKSRLSITKDNSKSQVFLKMNSLQTDDTARYYCARDGYSNFHYYVMDYWGQGTSVTVSSGGGGSGGGGSGGGGSGGGGSDIVLTQSPASLAVSLGQRATISCRASESVEYYVTSLMQWYQQKPGQPPKLLISAASNVESGVPARFSGSGSGTDFSLNIHPVEEDDIAMYFCQQSRKVPWTFGGGTKLEIKR

SEQ ID NO: 370 - DNA, 1548 bp, Artificial sequence
  Synthetic polynucleotide
  misc_feature: PIMS - W0007 (PN)
  misc_feature (1)..(60): Human VK3 leader
  misc_feature (61)..(66): Leader-hinge junction
  misc_feature (67)..(111): Hinge region
  misc_feature (112)..(762): CH2CH3 region
  misc_feature (763)..(786): Linker peptide
  misc_feature (787)..(1548): Binding domain
  misc_feature (1150)..(1209): Binding region linker
atggaagcaccagcgcagcttctcttcctcctgctactctggctcccagataccaccggtgaactcgagcccaaatcttgtgacaaaactcacacatgtccaccgtgcccagcacctgaactcctgggtggaccgtcagtcttcctcttccccccaaaacccaaggacaccctcatgatctcccggacccctgaggtcacatgcgtggtggtggacgtgagccacgaagaccctgaggtcaagttcaactggtacgtggacggcgtggaggtgcataatgccaagacaaagccgcgggaggagcagtacaacagcacgtaccgtgtggtcagcgtcctcaccgtcctgcaccaggactggctgaatggcaaggagtacaagtgcaaggtctccaacaaagccctcccagcccccatcgagaaaaccatctccaaagccaaagggcagccccgagaaccacaggtgtacaccctgcccccatcccgggatgagctgaccaagaaccaggtcagcctgacctgcctggtcaaaggcttctatccaagcgacatcgccgtggagtgggagagcaatgggcagccggagaacaactacaagaccacgcctcccgtgctggactccgacggctccttcttcctctacagcaagctcaccgtggacaagagcaggtggcagcaggggaacgtcttctcatgctccgtgatgcatgaggctctgcacaaccactacacgcagaagagcctctccctgtctccgggtaaagggtgtccaccttgtccgaattctcaggtgcagctgaaggagtcagggcctggcagcgtggcgccctcacagagcctgtccatcacatgcaccgtctcagggttctcattaaccggctatggtgtaaactgggttcgccagcctccaggaaagggtctggagtggctgggaatgatatggggtgatggaagcacagactataattcagctctcaaatccagactatcgatcaccaaggacaactccaagagccaagttttcttaaaaatgaacagtctgcaaactgatgacacagccagatactactgtgctcgagatggttatagtaactttcattactatgttatggactactggggtcaaggaacctcagtcaccgtctcctctgggggtggaggctctggtggcggtggatccggcggaggtgggtcgggtggcggcggatctgacattgtgctcacccaatctccagcttctttggctgtgtctctaggtcagagagccaccatctcctgcagagccagtgaaagtgttgaatattatgtcacaagtttaatgcagtggtaccaacagaaaccaggacagccacccaagctcctcatctctgctgctagcaacgtagaatctggggtccctgccaggtttagtggcagtgggtctgggacagactttagcctcaacatccatcctgtggaggaggatgatattgcaatgtatttctgtcagcaaagtaggaaggttccatggacgttcggtggaggcaccaagctggaaatcaaacgttaa

SEQ ID NO: 371 - protein, 515 aa, Artificial sequence
  Synthetic polypeptide
  misc_feature: PIMS - W0007 (AA)
  misc_feature (1)..(20): Human VK3 leader
  misc_feature (21)..(22): Leader-hinge junction
  misc_feature (23)..(37): Hinge region
  misc_feature (38)..(254): CH2CH3 region
  misc_feature (255)..(262): Linker peptide
  misc_feature (263)..(515): Binding domain
  misc_feature (384)..(403): Binding region linker
MEAPAQLLFLLLLWLPDTTGELEPKSSDKTHTCPPCPAPELLGGPSVFLFPPKPKDTLMISRTPEVTCVVVDVSHEDPEVKFNWYVDGVEVHNAKTKPREEQYNSTYRVVSVLTVLHQDWLNGKEYKCKVSNKALPAPIEKTISKAKGQPREPQVYTLPPSRDELTKNQVSLTCLVKGFYPSDIAVEWESNGQPENNYKTTPPVLDSDGSFFLYSKLTVDKSRWQQGNVFSCSVMHEALHNHYTQKSLSLSPGKGCPPCPNSQVQLKESGPGSVAPSQSLSITCTVSGFSLTGYGVNWVRQPPGKGLEWLGMIWGDGSTDYNSALKSRLSITKDNSKSQVFLKMNSLQTDDTARYYCARDGYSNFHYYVMDYWGQGTSVTVSSGGGGSGGGGSGGGGSGGGGSDIVLTQSPASLAVSLGQRATISCRASESVEYYVTSLMQWYQQKPGQPPKLLISAASNVESGVPARFSGSGSGTDFSLNIHPVEEDDIAMYFCQQSRKVPWTFGGGTKLEIKR

SEQ ID NO: 372 - DNA, 1503 bp, Artificial sequence
  Synthetic polynucleotide
  misc_feature: PIMS - W0008 (PN)
  misc_feature (1)..(60): Human VK3 leader
  misc_feature (61)..(66): Leader-hinge junction
  misc_feature (67)..(111): Hinge region
  misc_feature (112)..(762): CH2CH3 region
  misc_feature (763)..(786): Linker peptide
  misc_feature (787)..(1503): Binding domain
  misc_feature (1150)..(1185): Binding region linker
atggaagcaccagcgcagcttctcttcctcctgctactctggctcccagataccaccggtgaactcgagcccaaatcttgtgacaaaactcacacatgtccaccgtgcccagcacctgaactcctgggtggaccgtcagtcttcctcttccccccaaaacccaaggacaccctcatgatctcccggacccctgaggtcacatgcgtggtggtggacgtgagccacgaagaccctgaggtcaagttcaactggtacgtggacggcgtggaggtgcataatgccaagacaaagccgcgggaggagcagtacaacagcacgtaccgtgtggtcagcgtcctcaccgtcctgcaccaggactggctgaatggcaaggagtacaagtgcaaggtctccaacaaagccctcccagcccccatcgagaaaaccatctccaaagccaaagggcagccccgagaaccacaggtgtacaccctgcccccatcccgggatgagctgaccaagaaccaggtcagcctgacctgcctggtcaaaggcttctatccaagcgacatcgccgtggagtgggagagcaatgggcagccggagaacaactacaagaccacgcctcccgtgctggactccgacggctccttcttcctctacagcaagctcaccgtggacaagagcaggtggcagcaggggaacgtcttctcatgctccgtgatgcatgaggctctgcacaaccactacacgcagaagagcctctccctgtctccgggtaaagggtgtccaccttgtccgaattctcaggtgcagctggtgcagtctggtgctgagagcaagaagcctggggcctcagtgaaggtttcctgcaaggccagcggatacaccttcaccagctacaatatgcactgggtgcgacaggcgcctggacaagggctagagtggatgggagctatctatcctggaaatggtgatacatcctacaatcagaagttcaagggcagggtcaccatgaccagagacacgtccacgagcacagtctacatggagctgagcagcctgagatctgaggacacggccgtgtattactgtgcccgaagctactatagtaactcttactggtacttcgatctctggggccgcggcaccctggtcactgtctcctcggggggcggtggatcgggcggtggtggatctgctagcgaaattgtgttgacacagtctccagccaccctgtctttgtctccaggtgaaagagccaccctctcctgcagggccagttccagtgttagctacattgtttggtaccaacagaaacctggccaggcacctaggctcctcatctatgccccatccaacctggcttctggaataccagccaggttcagtggcagtggatccgggacagacttcactctcaccatcagcagtcttgagcctgaagattttgcagtttattactgtcagcagtggagttttaaccctcccacgttcggccaagggaccaaggtggaaatcaaa

SEQ ID NO: 373 - protein, 501 aa, Artificial sequence
  Synthetic polypeptide
  misc_feature: PIMS - W0008 (AA)
  misc_feature (1)..(20): Human VK3 leader
  misc_feature (21)..(22): Leader-hinge junction
  misc_feature (23)..(37): Hinge region
  misc_feature (38)..(254): CH2CH3 region
  misc_feature (255)..(262): Linker peptide
  misc_feature (263)..(501): Binding domain
  misc_feature (384)..(395): Binding region linker
MEAPAQLLFLLLLWLPDTTGELEPKSSDKTHTCPPCPAPELLGGPSVFLFPPKPKDTLMISRTPEVTCVVVDVSHEDPEVKFNWYVDGVEVHNAKTKPREEQYNSTYRVVSVLTVLHQDWLNGKEYKCKVSNKALPAPIEKTISKAKGQPREPQVYTLPPSRDELTKNQVSLTCLVKGFYPSDIAVEWESNGQPENNYKTTPPVLDSDGSFFLYSKLTVDKSRWQQGNVFSCSVMHEALHNHYTQKSLSLSPGKGCPPCPNSQVQLVQSGAESKKPGASVKVSCKASGYTFTSYNMHWVRQAPGQGLEWMGAIYPGNGDTSYNQKFKGRVTMTRDTSTSTVYMELSSLRSEDTAVYYCARSYYSNSYWYFDLWGRGTLVTVSSGGGGSGGGGSASEIVLTQSPATLSLSPGERATLSCRASSSVSYIVWYQQKPGQAPRLLIYAPSNLASGIPARFSGSGSGTDFTLTISSLEPEDFAVYYCQQWSFNPPTFGQGTKVEIK

SEQ ID NO: 374 - DNA, 1518 bp, Artificial sequence
  Synthetic polynucleotide
  misc_feature: PIMS - W0009 (PN)
  misc_feature (1)..(60): Human VK3 leader
  misc_feature (61)..(66): Leader-hinge junction
  misc_feature (67)..(111): Hinge region
  misc_feature (112)..(762): CH2CH3 region
  misc_feature (763)..(786): Linker peptide
  misc_feature (787)..(1518): Binding domain
  misc_feature (1150)..(1200): Binding region linker
atggaagcaccagcgcagcttctcttcctcctgctactctggctcccagataccaccggtgaactcgagcccaaatcttgtgacaaaactcacacatgtccaccgtgcccagcacctgaactcctgggtggaccgtcagtcttcctcttccccccaaaacccaaggacaccctcatgatctcccggacccctgaggtcacatgcgtggtggtggacgtgagccacgaagaccctgaggtcaagttcaactggtacgtggacggcgtggaggtgcataatgccaagacaaagccgcgggaggagcagtacaacagcacgtaccgtgtggtcagcgtcctcaccgtcctgcaccaggactggctgaatggcaaggagtacaagtgcaaggtctccaacaaagccctcccagcccccatcgagaaaaccatctccaaagccaaagggcagccccgagaaccacaggtgtacaccctgcccccatcccgggatgagctgaccaagaaccaggtcagcctgacctgcctggtcaaaggcttctatccaagcgacatcgccgtggagtgggagagcaatgggcagccggagaacaactacaagaccacgcctcccgtgctggactccgacggctccttcttcctctacagcaagctcaccgtggacaagagcaggtggcagcaggggaacgtcttctcatgctccgtgatgcatgaggctctgcacaaccactacacgcagaagagcctctccctgtctccgggtaaagggtgtccaccttgtccgaattctcaggtgcagctggtgcagtctggtgctgagagcaagaagcctggggcctcagtgaaggtttcctgcaaggccagcggatacaccttcaccagctacaatatgcactgggtgcgacaggcgcctggacaagggctagagtggatgggagctatctatcctggaaatggtgatacatcctacaatcagaagttcaagggcagggtcaccatgaccagagacacgtccacgagcacagtctacatggagctgagcagcctgagatctgaggacacggccgtgtattactgtgcccgaagctactatagtaactcttactggtacttcgatctctggggccgcggcaccctggtcactgtctcctcggggggcggtggatcgggcggtggtggatctggaggaggtgggtctgctagcgaaattgtgttgacacagtctccagccaccctgtctttgtctccaggtgaaagagccaccctctcctgcagggccagttccagtgttagctacattgtttggtaccaacagaaacctggccaggcacctaggctcctcatctatgccccatccaacctggcttctggaataccagccaggttcagtggcagtggatccgggacagacttcactctcaccatcagcagtcttgagcctgaagattttgcagtttattactgtcagcagtggagttttaaccctcccacgttcggccaagggaccaaggtggaaatcaaa

SEQ ID NO: 375 - protein, 506 aa, Artificial sequence
  Synthetic polypeptide
  misc_feature: PIMS - W0009 (AA)
  misc_feature (1)..(20): Human VK3 leader
  misc_feature (21)..(22): Leader-hinge junction
  misc_feature (23)..(37): Hinge region
  misc_feature (255)..(262): Linker peptide
  misc_feature (263)..(506): Binding domain
  misc_feature (384)..(400): Binding region linker
MEAPAQLLFLLLLWLPDTTGELEPKSSDKTHTCPPCPAPELLGGPSVFLFPPKPKDTLMISRTPEVTCVVVDVSHEDPEVKFNWYVDGVEVHNAKTKPREEQYNSTYRVVSVLTVLHQDWLNGKEYKCKVSNKALPAPIEKTISKAKGQPREPQVYTLPPSRDELTKNQVSLTCLVKGFYPSDIAVEWESNGQPENNYKTTPPVLDSDGSFFLYSKLTVDKSRWQQGNVFSCSVMHEALHNHYTQKSLSLSPGKGCPPCPNSQVQLVQSGAESKKPGASVKVSCKASGYTFTSYNMHWVRQAPGQGLEWMGAIYPGNGDTSYNQKFKGRVTMTRDTSTSTVYMELSSLRSEDTAVYYCARSYYSNSYWYFDLWGRGTLVTVSSGGGGSGGGGSGGGGSASEIVLTQSPATLSLSPGERATLSCRASSSVSYIVWYQQKPGQAPRLLIYAPSNLASGIPARFSGSGSGTDFTLTISSLEPEDFAVYYCQQWSFNPPTFGQGTKVEIK

SEQ ID NO: 376 - DNA, 330 bp, Artificial sequence
  IgG CH2 domain_nt
gcacctgaactcctgggtggaccgtcagtcttcctcttccccccaaaacccaaggacaccctcatgatctcccggacccctgaggtcacatgcgtggtggtggacgtgagccacgaagaccctgaggtcaagttcaactggtacgtggacggcgtggaggtgcataatgccaagacaaagccgcgggaggagcagtacaacagcacgtaccgtgtggtcagcgtcctcaccgtcctgcaccaggactggctgaatggcaaggagtacaagtgcaaggtctccaacaaagccctcccagcccccatcgagaaaaccatctccaaagccaaa

SEQ ID NO: 377 - protein, 110 aa, Artificial sequence
  IgG CH2 domain _aa
APELLGGPSVFLFPPKPKDTLMISRTPEVTCVVVDVSHEDPEVKFNWYVDGVEVHNAKTKPREEQYNSTYRVVSVLTVLHQDWLNGKEYKCKVSNKALPAPIEKTISKAK

SEQ ID NO: 378 - DNA, 321 bp, Artificial sequence
  IgG CH3 domain_nt
gggcagccccgagaaccacaggtgtacaccctgcccccatcccgggatgagctgaccaagaaccaggtcagcctgacctgcctggtcaaaggcttctatccaagcgacatcgccgtggagtgggagagcaatgggcagccggagaacaactacaagaccacgcctcccgtgctggactccgacggctccttcttcctctacagcaagctcaccgtggacaagagcaggtggcagcaggggaacgtcttctcatgctccgtgatgcatgaggctctgcacaaccactacacgcagaagagcctctccctgtctccgggtaaa

SEQ ID NO: 379 - protein, 107 aa, IgG CH3 domain_aa
GQPREPQVYTLPPSRDELTKNQVSLTCLVKGFYPSDIAVEWESNGQPENNYKTTPPVLDSDGSFFLYSKLTVDKSRWQQGNVFSCSVMHEALHNHYTQKSLSLSPGK

SEQ ID NO: 380 - DNA, 1509 bp, Artificial sequence
  Synthetic polynucleotide W0008_pims_CD20_10 (13bp - 1521bp, direct)
atggaagcaccagcgcagcttctcttcctcctgctactctggctcccagataccaccggtgaactcgagcccaaatcttctgacaaaactcacacatgcccaccgtgcccagcacctgaactcctgggtggaccgtcagtcttcctcttccccccaaaacccaaggacaccctcatgatctcccggacccctgaggtcacatgcgtggtggtggacgtgagccacgaagaccctgaggtcaagttcaactggtacgtggacggcgtggaggtgcataatgccaagacaaagccgcgggaggagcagtacaacagcacgtaccgtgtggtcagcgtcctcaccgtcctgcaccaggactggctgaatggcaaggagtacaagtgcaaggtctccaacaaagccctcccagcccccatcgagaaaaccatctccaaagccaaagggcagccccgagaaccacaggtgtacaccctgcccccatcccgggatgagctgaccaagaaccaggtcagcctgacctgcctggtcaaaggcttctatccaagcgacatcgccgtggagtgggagagcaatgggcagccggagaacaactacaagaccacgcctcccgtgctggactccgacggctccttcttcctctacagcaagctcaccgtggacaagagcaggtggcagcaggggaacgtcttctcatgctccgtgatgcatgaggctctgcacaaccactacacgcagaagagcctctccctgtctccgggtaaggggtgtccaccttgtccgaattctcaggtgcagctggtgcagtctggtgctgagagcaagaagcctggggcctcagtgaaggtttcctgcaaggccagcggatacaccttcaccagctacaatatgcactgggtgcgacaggcgcctggacaagggctagagtggatgggagctatctatcctggaaatggtgatacatcctacaatcagaagttcaagggcagggtcaccatgaccagagacacgtccacgagcacagtctacatggagctgagcagcctgagatctgaggacacggccgtgtattactgtgcccgaagctactatagtaactcttactggtacttcgatctctggggccgcggcaccctggtcactgtctcctcggggggcggtggatcgggcggtggtggatctgctagcgaaattgtgttgacacagtctccagccaccctgtctttgtctccaggtgaaagagccaccctctcctgcagggccagttccagtgttagctacattgtttggtaccaacagaaacctggccaggcacctaggctcctcatctatgccccatccaacctggcttctggaataccagccaggttcagtggcagtggatccgggacagacttcactctcaccatcagcagtcttgagcctgaagattttgcagtttattactgtcagcagtggagttttaaccctcccacgttcggccaagggaccaaggtggaaatcaaagactga

SEQ ID NO: 381 - protein, 502 aa, Artificial sequence
  Synthetic polypeptide W0008_pims_CD20_10 (1aa - 502aa)
  MISC_FEATURE (1)..(20): Leader sequence
  MISC_FEATURE (21)..(22): Junction
  MISC_FEATURE (23)..(37): Hinge region (Linker)
  MISC_FEATURE (38)..(254): CH2CH3 region
  MISC_FEATURE (255)..(262): PIMS linker
  MISC_FEATURE (263)..(292): Heavy region
  MISC_FEATURE (293)..(297): Heavy chain CDR sub-domain
  MISC_FEATURE (298)..(311): Heavy region
  MISC_FEATURE (312)..(328): Heavy chain CDR sub-domain
  MISC_FEATURE (329)..(360): Heavy region
  MISC_FEATURE (361)..(372): Heavy chain CDR sub-domain
  MISC_FEATURE (373)..(383): Heavy region
  MISC_FEATURE (384)..(395): Hinge region (Linker)
  MISC_FEATURE (396)..(418): Light region
  MISC_FEATURE (419)..(428): Light chain CDR sub-domain
  MISC_FEATURE (429)..(443): Light region
  MISC_FEATURE (444)..(450): Light chain CDR sub-domain
  MISC_FEATURE (451)..(482): Light region
  MISC_FEATURE (483)..(491): Light chain CDR sub-domain
  MISC_FEATURE (492)..(502): Light region
MEAPAQLLFLLLLWLPDTTGELEPKSSDKTHTCPPCPAPELLGGPSVFLFPPKPKDTLMISRTPEVTCVVVDVSHEDPEVKFNWYVDGVEVHNAKTKPREEQYNSTYRVVSVLTVLHQDWLNGKEYKCKVSNKALPAPIEKTISKAKGQPREPQVYTLPPSRDELTKNQVSLTCLVKGFYPSDIAVEWESNGQPENNYKTTPPVLDSDGSFFLYSKLTVDKSRWQQGNVFSCSVMHEALHNHYTQKSLSLSPGKGCPPCPNSQVQLVQSGAESKKPGASVKVSCKASGYTFTSYNMHWVRQAPGQGLEWMGAIYPGNGDTSYNQKFKGRVTMTRDTSTSTVYMELSSLRSEDTAVYYCARSYYSNSYWYFDLWGRGTLVTVSSGGGGSGGGGSASEIVLTQSPATLSLSPGERATLSCRASSSVSYIVWYQQKPGQAPRLLIYAPSNLASGIPARFSGSGSGTDFTLTISSLEPEDFAVYYCQQWSFNPPTFGQGTKVEIKD

SEQ ID NO: 382 - DNA, 1524 bp, Artificial sequence
  Synthetic polynucleotide W0009_pims_CD20_15 (13bp - 1536bp, direct)
atggaagcaccagcgcagcttctcttcctcctgctactctggctcccagataccaccggtgaactcgagcccaaatcttctgacaaaactcacacatgcccaccgtgcccagcacctgaactcctgggtggaccgtcagtcttcctcttccccccaaaacccaaggacaccctcatgatctcccggacccctgaggtcacatgcgtggtggtggacgtgagccacgaagaccctgaggtcaagttcaactggtacgtggacggcgtggaggtgcataatgccaagacaaagccgcgggaggagcagtacaacagcacgtaccgtgtggtcagcgtcctcaccgtcctgcaccaggactggctgaatggcaaggagtacaagtgcaaggtctccaacaaagccctcccagcccccatcgagaaaaccatctccaaagccaaagggcagccccgagaaccacaggtgtacaccctgcccccatcccgggatgagctgaccaagaaccaggtcagcctgacctgcctggtcaaaggcttctatccaagcgacatcgccgtggagtgggagagcaatgggcagccggagaacaactacaagaccacgcctcccgtgctggactccgacggctccttcttcctctacagcaagctcaccgtggacaagagcaggtggcagcaggggaacgtcttctcatgctccgtgatgcatgaggctctgcacaaccactacacgcagaagagcctctccctgtctccgggtaaggggtgtccaccttgtccgaattctcaggtgcagctggtgcagtctggtgctgagagcaagaagcctggggcctcagtgaaggtttcctgcaaggccagcggatacaccttcaccagctacaatatgcactgggtgcgacaggcgcctggacaagggctagagtggatgggagctatctatcctggaaatggtgatacatcctacaatcagaagttcaagggcagggtcaccatgaccagagacacgtccacgagcacagtctacatggagctgagcagcctgagatctgaggacacggccgtgtattactgtgcccgaagctactatagtaactcttactggtacttcgatctctggggccgcggcaccctggtcactgtctcctcggggggcggtggatcgggcggtggtggatctggaggaggtgggtctgctagcgaaattgtgttgacacagtctccagccaccctgtctttgtctccaggtgaaagagccaccctctcctgcagggccagttccagtgttagctacattgtttggtaccaacagaaacctggccaggcacctaggctcctcatctatgccccatccaacctggcttctggaataccagccaggttcagtggcagtggatccgggacagacttcactctcaccatcagcagtcttgagcctgaagattttgcagtttattactgtcagcagtggagttttaaccctcccacgttcggccaagggaccaaggtggaaatcaaagactga

SEQ ID NO: 383 - protein, 507 aa, Artificial sequence
  Synthetic polypeptide W0009_pims_CD20_15_protein (1aa - 507aa)
  MISC_FEATURE (1)..(20): Leader sequence
  MISC_FEATURE (21)..(22): Junction
  MISC_FEATURE (23)..(37): Hinge region (Linker)
  MISC_FEATURE (38)..(254): CH2CH3 region
  MISC_FEATURE (255)..(262): PIMS linker
  MISC_FEATURE (263)..(292): Heavy region
  MISC_FEATURE (293)..(297): Heavy chain CDR sub-domain
  MISC_FEATURE (298)..(311): Heavy region
  MISC_FEATURE (312)..(328): Heavy chain CDR sub-domain
  MISC_FEATURE (329)..(360): Heavy region
  MISC_FEATURE (361)..(372): Heavy chain CDR sub-domain
  MISC_FEATURE (373)..(383): Heavy region
  MISC_FEATURE (384)..(400): Hinge region (Linker)
  MISC_FEATURE (401)..(423): Light region
  MISC_FEATURE (424)..(433): Light chain CDR sub-domain
  MISC_FEATURE (434)..(448): Light region
  MISC_FEATURE (449)..(455): Light chain CDR sub-domain
  MISC_FEATURE (456)..(487): Light region
  MISC_FEATURE (488)..(496): Light chain CDR sub-domain
  MISC_FEATURE (497)..(507): Light region
MEAPAQLLFLLLLWLPDTTGELEPKSSDKTHTCPPCPAPELLGGPSVFLFPPKPKDTLMISRTPEVTCVVVDVSHEDPEVKFNWYVDGVEVHNAKTKPREEQYNSTYRVVSVLTVLHQDWLNGKEYKCKVSNKALPAPIEKTISKAKGQPREPQVYTLPPSRDELTKNQVSLTCLVKGFYPSDIAVEWESNGQPENNYKTTPPVLDSDGSFFLYSKLTVDKSRWQQGNVFSCSVMHEALHNHYTQKSLSLSPGKGCPPCPNSQVQLVQSGAESKKPGASVKVSCKASGYTFTSYNMHWVRQAPGQGLEWMGAIYPGNGDTSYNQKFKGRVTMTRDTSTSTVYMELSSLRSEDTAVYYCARSYYSNSYWYFDLWGRGTLVTVSSGGGGSGGGGSGGGGSASEIVLTQSPATLSLSPGERATLSCRASSSVSYIVWYQQKPGQAPRLLIYAPSNLASGIPARFSGSGSGTDFTLTISSLEPEDFAVYYCQQWSFNPPTFGQGTKVEIKD

SEQ ID NO: 384 - DNA, 1524 bp, Artificial sequence
  Synthetic polynucleotide W0009_H8 (13bp - 1536bp, direct)
atggaagcaccagcgcagcttctcttcctcctgctactctggctcccagataccaccggtgaactcgagcccaaatcttctgacaaaactcacacatgcccaccgtgcccagcacctgaactcctgggtggaccgtcagtcttcctcttccccccaaaacccaaggacaccctcatgatctcccggacccctgaggtcacatgcgtggtggtggacgtgagccacgaagaccctgaggtcaagttcaactggtacgtggacggcgtggaggtgcataatgccaagacaaagccgcgggaggagcagtacaacagcacgtaccgtgtggtcagcgtcctcaccgtcctgcaccaggactggctgaatggcaaggagtacaagtgcaaggtctccaacaaagccctcccagcccccatcgagaaaaccatctccaaagccaaagggcagccccgagaaccacaggtgtacaccctgcccccatcccgggatgagctgaccaagaaccaggtcagcctgacctgcctggtcaaaggcttctatccaagcgacatcgccgtggagtgggagagcaatgggcagccggagaacaactacaagaccacgcctcccgtgctggactccgacggctccttcttcctctacagcaagctcaccgtggacaagagcaggtggcagcaggggaacgtcttctcatgctccgtgatgcatgaggctctgcacaaccactacacgcagaagagcctctccctgtctccgggtaaaggatctccaccttctccgaattctcaggtgcagctggtgcagtctggtgctgagagcaagaagcctggggcctcagtgaaggtttcctgcaaggccagcggatacaccttcaccagctacaatatgcactgggtgcgacaggcgcctggacaagggctagagtggatgggagctatctatcctggaaatggtgatacatcctacaatcagaagttcaagggcagggtcaccatgaccagagacacgtccacgagcacagtctacatggagctgagcagcctgagatctgaggacacggccgtgtattactgtgcccgaagctactatagtaactcttactggtacttcgatctctggggccgcggcaccctggtcactgtctcctcggggggcggtggatcgggcggtggtggatctggaggaggtgggtctgctagcgaaattgtgttgacacagtctccagccaccctgtctttgtctccaggtgaaagagccaccctctcctgcagggccagttccagtgttagctacattgtttggtaccaacagaaacctggccaggcacctaggctcctcatctatgccccatccaacctggcttctggaataccagccaggttcagtggcagtggatccgggacagacttcactctcaccatcagcagtcttgagcctgaagattttgcagtttattactgtcagcagtggagttttaaccctcccacgttcggccaagggaccaaggtggaaatcaaagactga

SEQ ID NO: 385 - protein, 508 aa, Artificial sequence
  Synthetic polypeptide W0009_H8 (1aa - 508aa)
  MISC_FEATURE (1)..(20): Leader sequence
  MISC_FEATURE (21)..(22): Junction
  MISC_FEATURE (23)..(37): Hinge region (Linker)
  MISC_FEATURE (38)..(254): CH2CH3 region
  MISC_FEATURE (255)..(262): PIMS linker
  MISC_FEATURE (263)..(292): Heavy region
  MISC_FEATURE (293)..(297): Heavy chain CDR sub-domain
  MISC_FEATURE (298)..(311): Heavy region
  MISC_FEATURE (312)..(328): Heavy chain CDR sub-domain
  MISC_FEATURE (329)..(360): Heavy region
  MISC_FEATURE (361)..(372): Heavy chain CDR sub-domain
  MISC_FEATURE (373)..(383): Heavy region
  MISC_FEATURE (384)..(400): Hinge region (Linker)
  MISC_FEATURE (401)..(423): Light region
  MISC_FEATURE (424)..(433): Light chain CDR sub-domain
  MISC_FEATURE (434)..(448): Light region
  MISC_FEATURE (449)..(455): Light chain CDR sub-domain
  MISC_FEATURE (456)..(487): Light region
  MISC_FEATURE (488)..(496): Light chain CDR sub-domain
  MISC_FEATURE (497)..(507): Light region
  MISC_FEATURE (508)..(508): Xaa is a stop codon
MEAPAQLLFLLLLWLPDTTGELEPKSSDKTHTCPPCPAPELLGGPSVFLFPPKPKDTLMISRTPEVTCVVVDVSHEDPEVKFNWYVDGVEVHNAKTKPREEQYNSTYRVVSVLTVLHQDWLNGKEYKCKVSNKALPAPIEKTISKAKGQPREPQVYTLPPSRDELTKNQVSLTCLVKGFYPSDIAVEWESNGQPENNYKTTPPVLDSDGSFFLYSKLTVDKSRWQQGNVFSCSVMHEALHNHYTQKSLSLSPGKGSPPSPNSQVQLVQSGAESKKPGASVKVSCKASGYTFTSYNMHWVRQAPGQGLEWMGAIYPGNGDTSYNQKFKGRVTMTRDTSTSTVYMELSSLRSEDTAVYYCARSYYSNSYWYFDLWGRGTLVTVSSGGGGSGGGGSGGGGSASEIVLTQSPATLSLSPGERATLSCRASSSVSYIVWYQQKPGQAPRLLIYAPSNLASGIPARFSGSGSGTDFTLTISSLEPEDFAVYYCQQWSFNPPTFGQGTKVEIKDX

SEQ ID NO: 386 - DNA, 1518 bp, Artificial sequence
  Synthetic polynucleotide W0009_H9 (13bp - 1530bp, direct)
atggaagcaccagcgcagcttctcttcctcctgctactctggctcccagataccaccggtgaactcgagcccaaatcttctgacaaaactcacacatgcccaccgtgcccagcacctgaactcctgggtggaccgtcagtcttcctcttccccccaaaacccaaggacaccctcatgatctcccggacccctgaggtcacatgcgtggtggtggacgtgagccacgaagaccctgaggtcaagttcaactggtacgtggacggcgtggaggtgcataatgccaagacaaagccgcgggaggagcagtacaacagcacgtaccgtgtggtcagcgtcctcaccgtcctgcaccaggactggctgaatggcaaggagtacaagtgcaaggtctccaacaaagccctcccagcccccatcgagaaaaccatctccaaagccaaagggcagccccgagaaccacaggtgtacaccctgcccccatcccgggatgagctgaccaagaaccaggtcagcctgacctgcctggtcaaaggcttctatccaagcgacatcgccgtggagtgggagagcaatgggcagccggagaacaactacaagaccacgcctcccgtgctggactccgacggctccttcttcctctacagcaagctcaccgtggacaagagcaggtggcagcaggggaacgtcttctcatgctccgtgatgcatgaggctctgcacaaccactacacgcagaagagcctctccctgtctccgggttctccaccttctccgaattctcaggtgcagctggtgcagtctggtgctgagagcaagaagcctggggcctcagtgaaggtttcctgcaaggccagcggatacaccttcaccagctacaatatgcactgggtgcgacaggcgcctggacaagggctagagtggatgggagctatctatcctggaaatggtgatacatcctacaatcagaagttcaagggcagggtcaccatgaccagagacacgtccacgagcacagtctacatggagctgagcagcctgagatctgaggacacggccgtgtattactgtgcccgaagctactatagtaactcttactggtacttcgatctctggggccgcggcaccctggtcactgtctcctcggggggcggtggatcgggcggtggtggatctggaggaggtgggtctgctagcgaaattgtgttgacacagtctccagccaccctgtctttgtctccaggtgaaagagccaccctctcctgcagggccagttccagtgttagctacattgtttggtaccaacagaaacctggccaggcacctaggctcctcatctatgccccatccaacctggcttctggaataccagccaggttcagtggcagtggatccgggacagacttcactctcaccatcagcagtcttgagcctgaagattttgcagtttattactgtcagcagtggagttttaaccctcccacgttcggccaagggaccaaggtggaaatcaaagactga

SEQ ID NO: 387 - protein, 506 aa, Artificial sequence
  Synthetic polypeptide W0009_H9 (1aa - 506aa)
  MISC_FEATURE (1)..(20): Leader sequence
  MISC_FEATURE (21)..(22): Junction
  MISC_FEATURE (23)..(37): Hinge region (Linker)
  MISC_FEATURE (38)..(252): CH2CH3 region
  MISC_FEATURE (253)..(260): PIMS linker
  MISC_FEATURE (261)..(290): Heavy region
  MISC_FEATURE (291)..(295): Heavy chain CDR sub-domain
  MISC_FEATURE (296)..(309): Heavy region
  MISC_FEATURE (310)..(326): Heavy chain CDR sub-domain
  MISC_FEATURE (327)..(358): Heavy region
  MISC_FEATURE (359)..(370): Heavy chain CDR sub-domain
  MISC_FEATURE (371)..(381): Heavy region
  MISC_FEATURE (382)..(398): Hinge region (Linker)
  MISC_FEATURE (399)..(421): Light region
  MISC_FEATURE (422)..(431): Light chain CDR sub-domain
  MISC_FEATURE (432)..(446): Light region
  MISC_FEATURE (447)..(453): Light chain CDR sub-domain
  MISC_FEATURE (454)..(485): Light region
  MISC_FEATURE (486)..(494): Light chain CDR sub-domain
  MISC_FEATURE (495)..(505): Light region
  MISC_FEATURE (506)..(506): Xaa is a stop codon
MEAPAQLLFLLLLWLPDTTGELEPKSSDKTHTCPPCPAPELLGGPSVFLFPPKPKDTLMISRTPEVTCVVVDVSHEDPEVKFNWYVDGVEVHNAKTKPREEQYNSTYRVVSVLTVLHQDWLNGKEYKCKVSNKALPAPIEKTISKAKGQPREPQVYTLPPSRDELTKNQVSLTCLVKGFYPSDIAVEWESNGQPENNYKTTPPVLDSDGSFFLYSKLTVDKSRWQQGNVFSCSVMHEALHNHYTQKSLSLSPGSPPSPNSQVQLVQSGAESKKPGASVKVSCKASGYTFTSYNMHWVRQAPGQGLEWMGAIYPGNGDTSYNQKFKGRVTMTRDTSTSTVYMELSSLRSEDTAVYYCARSYYSNSYWYFDLWGRGTLVTVSSGGGGSGGGGSGGGGSASEIVLTQSPATLSLSPGERATLSCRASSSVSYIVWYQQKPGQAPRLLIYAPSNLASGIPARFSGSGSGTDFTLTISSLEPEDFAVYYCQQWSFNPPTFGQGTKVEIKDX

SEQ ID NO: 388 - DNA, 1551 bp, Artificial sequence
  Synthetic polynucleotide W0009_H10 (13bp - 1563bp, direct)
atggaagcaccagcgcagcttctcttcctcctgctactctggctcccagataccaccggtgaactcgagcccaaatcttctgacaaaactcacacatgcccaccgtgcccagcacctgaactcctgggtggaccgtcagtcttcctcttccccccaaaacccaaggacaccctcatgatctcccggacccctgaggtcacatgcgtggtggtggacgtgagccacgaagaccctgaggtcaagttcaactggtacgtggacggcgtggaggtgcataatgccaagacaaagccgcgggaggagcagtacaacagcacgtaccgtgtggtcagcgtcctcaccgtcctgcaccaggactggctgaatggcaaggagtacaagtgcaaggtctccaacaaagccctcccagcccccatcgagaaaaccatctccaaagccaaagggcagccccgagaaccacaggtgtacaccctgcccccatcccgggatgagctgaccaagaaccaggtcagcctgacctgcctggtcaaaggcttctatccaagcgacatcgccgtggagtgggagagcaatgggcagccggagaacaactacaagaccacgcctcccgtgctggactccgacggctccttcttcctctacagcaagctcaccgtggacaagagcaggtggcagcaggggaacgtcttctcatgctccgtgatgcatgaggctctgcacaaccactacacgcagaagagcctctccctgtctccgggtaaggagcccaaatctaccgacaaaactcacacatgtccaccctgcccgaattctcaggtgcagctggtgcagtctggtgctgagagcaagaagcctggggcctcagtgaaggtttcctgcaaggccagcggatacaccttcaccagctacaatatgcactgggtgcgacaggcgcctggacaagggctagagtggatgggagctatctatcctggaaatggtgatacatcctacaatcagaagttcaagggcagggtcaccatgaccagagacacgtccacgagcacagtctacatggagctgagcagcctgagatctgaggacacggccgtgtattactgtgcccgaagctactatagtaactcttactggtacttcgatctctggggccgcggcaccctggtcactgtctcctcggggggcggtggatcgggcggtggtggatctggaggaggtgggtctgctagcgaaattgtgttgacacagtctccagccaccctgtctttgtctccaggtgaaagagccaccctctcctgcagggccagttccagtgttagctacattgtttggtaccaacagaaacctggccaggcacctaggctcctcatctatgccccatccaacctggcttctggaataccagccaggttcagtggcagtggatccgggacagacttcactctcaccatcagcagtcttgagcctgaagattttgcagtttattactgtcagcagtggagttttaaccctcccacgttcggccaagggaccaaggtggaaatcaaagactga

SEQ ID NO: 389 - protein, 517 aa, Artificial sequence
  Synthetic polypeptide W0009_H10 (1aa - 517aa)
  MISC_FEATURE (1)..(20): Leader sequence
  MISC_FEATURE (21)..(22): Junction
  MISC_FEATURE (23)..(37): Hinge region (Linker)
  MISC_FEATURE (38)..(254): CH2CH3 region
  MISC_FEATURE (255)..(271): PIMS linker
  MISC_FEATURE (272)..(301): Heavy region
  MISC_FEATURE (302)..(306): Heavy chain CDR sub-domain
  MISC_FEATURE (307)..(320): Heavy region
  MISC_FEATURE (321)..(337): Heavy chain CDR sub-domain
  MISC_FEATURE (338)..(369): Heavy region
  MISC_FEATURE (370)..(381): Heavy chain CDR sub-domain
  MISC_FEATURE (382)..(392): Heavy region
  MISC_FEATURE (393)..(409): Hinge region (Linker)
  MISC_FEATURE (410)..(432): Light region
  MISC_FEATURE (433)..(442): Light chain CDR sub-domain
  MISC_FEATURE (443)..(457): Light region
  MISC_FEATURE (458)..(464): Light chain CDR sub-domain
  MISC_FEATURE (465)..(496): Light region
  MISC_FEATURE (497)..(505): Light chain CDR sub-domain
  MISC_FEATURE (506)..(516): Light region
  MISC_FEATURE (517)..(517): Xaa is a stop codon
MEAPAQLLFLLLLWLPDTTGELEPKSSDKTHTCPPCPAPELLGGPSVFLFPPKPKDTLMISRTPEVTCVVVDVSHEDPEVKFNWYVDGVEVHNAKTKPREEQYNSTYRVVSVLTVLHQDWLNGKEYKCKVSNKALPAPIEKTISKAKGQPREPQVYTLPPSRDELTKNQVSLTCLVKGFYPSDIAVEWESNGQPENNYKTTPPVLDSDGSFFLYSKLTVDKSRWQQGNVFSCSVMHEALHNHYTQKSLSLSPGKEPKSTDKTHTCPPCPNSQVQLVQSGAESKKPGASVKVSCKASGYTFTSYNMHWVRQAPGQGLEWMGAIYPGNGDTSYNQKFKGRVTMTRDTSTSTVYMELSSLRSEDTAVYYCARSYYSNSYWYFDLWGRGTLVTVSSGGGGSGGGGSGGGGSASEIVLTQSPATLSLSPGERATLSCRASSSVSYIVWYQQKPGQAPRLLIYAPSNLASGIPARFSGSGSGTDFTLTISSLEPEDFAVYYCQQWSFNPPTFGQGTKVEIKDX

SEQ ID NO: 390 - DNA, 1527 bp, Artificial sequence
  Synthetic polynucleotide W0011 (13bp - 1539bp, direct)
atggaagcaccagcgcagcttctcttcctcctgctactctggctcccagataccaccggttcctcgagcgagcccaaatcttctgacaaaactcacacatgcccaccgtgcccagcacctgaactcctgggtggaccgtcagtcttcctcttccccccaaaacccaaggacaccctcatgatctcccggacccctgaggtcacatgcgtggtggtggacgtgagccacgaagaccctgaggtcaagttcaactggtacgtggacggcgtggaggtgcataatgccaagacaaagccgcgggaggagcagtacaacagcacgtaccgtgtggtcagcgtcctcaccgtcctgcaccaggactggctgaatggcaaggagtacaagtgcaaggtctccaacaaagccctcccagcccccatcgagaaaaccatctccaaagccaaagggcagccccgagaaccacaggtgtacaccctgcccccatcccgggatgagctgaccaagaaccaggtcagcctgacctgcctggtcaaaggcttctatccaagcgacatcgccgtggagtgggagagcaatgggcagccggagaacaactacaagaccacgcctcccgtgctggactccgacggctccttcttcctctacagcaagctcaccgtggacaagagcaggtggcagcaggggaacgtcttctcatgctccgtgatgcatgaggctctgcacaaccactacacgcagaagagcctctccctgtctccgggtaaggggtgtccaccttgtccgaattctcaggtgcagctggtgcagtctggtgctgagagcaagaagcctggggcctcagtgaaggtttcctgcaaggccagcggatacaccttcaccagctacaatatgcactgggtgcgacaggcgcctggacaagggctagagtggatgggagctatctatcctggaaatggtgatacatcctacaatcagaagttcaagggcagggtcaccatgaccagagacacgtccacgagcacagtctacatggagctgagcagcctgagatctgaggacacggccgtgtattactgtgcccgaagctactatagtaactcttactggtacttcgatctctggggccgcggcaccctggtcactgtctcctcggggggcggtggatcgggcggtggtggatctggaggaggtgggtctgctagcgaaattgtgttgacacagtctccagccaccctgtctttgtctccaggtgaaagagccaccctctcctgcagggccagttccagtgttagctacattgtttggtaccaacagaaacctggccaggcacctaggctcctcatctatgccccatccaacctggcttctggaataccagccaggttcagtggcagtggatccgggacagacttcactctcaccatcagcagtcttgagcctgaagattttgcagtttattactgtcagcagtggagttttaaccctcccacgttcggccaagggaccaaggtggaaatcaaagactga

SEQ ID NO: 391 - protein, 508 aa, Artificial sequence
  Synthetic polypeptide W0011_prot (1aa - 509aa)
  MISC_FEATURE (1)..(20): Leader sequence
  MISC_FEATURE (21)..(23): Junction
  MISC_FEATURE (24)..(38): Hinge region (Linker)
  MISC_FEATURE (39)..(255): CH2CH3 region
  MISC_FEATURE (256)..(263): PIMS linker
  MISC_FEATURE (264)..(293): Heavy region
  MISC_FEATURE (294)..(298): Heavy chain CDR sub-domain
  MISC_FEATURE (299)..(312): Heavy region
  MISC_FEATURE (313)..(329): Heavy chain CDR sub-domain
  MISC_FEATURE (330)..(361): Heavy region
  MISC_FEATURE (362)..(373): Heavy chain CDR sub-domain
  MISC_FEATURE (374)..(384): Heavy region
  MISC_FEATURE (385)..(401): Hinge region (Linker)
  MISC_FEATURE (402)..(424): Light region
  MISC_FEATURE (425)..(434): Light chain CDR sub-domain
  MISC_FEATURE (435)..(449): Light region
  MISC_FEATURE (450)..(456): Light chain CDR sub-domain
  MISC_FEATURE (457)..(488): Light region
  MISC_FEATURE (489)..(497): Light chain CDR sub-domain
  MISC_FEATURE (498)..(508): Light region
  MISC_FEATURE (509)..(509): Xaa is a stop codon
MEAPAQLLFLLLLWLPDTTGSSSEPKSSDKTHTCPPCPAPELLGGPSVFLFPPKPKDTLMISRTPEVTCVVVDVSHEDPEVKFNWYVDGVEVHNAKTKPREEQYNSTYRVVSVLTVLHQDWLNGKEYKCKVSNKALPAPIEKTISKAKGQPREPQVYTLPPSRDELTKNQVSLTCLVKGFYPSDIAVEWESNGQPENNYKTTPPVLDSDGSFFLYSKLTVDKSRWQQGNVFSCSVMHEALHNHYTQKSLSLSPGKGCPPCPNSQVQLVQSGAESKKPGASVKVSCKASGYTFTSYNMHWVRQAPGQGLEWMGAIYPGNGDTSYNQKFKGRVTMTRDTSTSTVYMELSSLRSEDTAVYYCARSYYSNSYWYFDLWGRGTLVTVSSGGGGSGGGGSGGGGSASEIVLTQSPATLSLSPGERATLSCRASSSVSYIVWYQQKPGQAPRLLIYAPSNLASGIPARFSGSGSGTDFTLTISSLEPEDFAVYYCQQWSFNPPTFGQGTKVEIKD

SEQ ID NO: 392 - DNA, 1479 bp, Artificial sequence
  Synthetic polynucleotide DNE090 - human VK3 leader through VK3
atggaagcaccagcgcagcttctcttcctcctgctactctggctcccagataccaccggttcctcgagcgagcccaaatcttctgacaaaactcacacatgcccaccgtgcccagcacctgaactcctgggtggaccgtcagtcttcctcttccccccaaaacccaaggacaccctcatgatctcccggacccctgaggtcacatgcgtggtggtggacgtgagccacgaagaccctgaggtcaagttcaactggtacgtggacggcgtggaggtgcataatgccaagacaaagccgcgggaggagcagtacaacagcacgtaccgtgtggtcagcgtcctcaccgtcctgcaccaggactggctgaatggcaaggagtacaagtgcaaggtctccaacaaagccctcccagcccccatcgagaaaaccatctccaaagccaaagggcagccccgagaaccacaggtgtacaccctgcccccatcccgggatgagctgaccaagaaccaggtcagcctgacctgcctggtcaaaggcttctatccaagcgacatcgccgtggagtgggagagcaatgggcagccggagaacaactacaagaccacgcctcccgtgctggactccgacggctccttcttcctctacagcaagctcaccgtggacaagagcaggtggcagcaggggaacgtcttctcatgctccgtgatgcatgaggctctgcacaaccactacacgcagaagagcctctccctgtctccgggtaaggggtgtccaccttgtccgaattctgaggtgcagctggtgcagtctggagcagaggtgaaaaagcccggagagtctctgaagatttcctgtaagggatccggatacagctttaccagctacaacatgcactgggtgcgccagatgcccgggaaaggcctagagtggatgggggctatctatcctggaaatggtgatacatcctacaatcagaagttcaagggccaggtcactatctcggccgacaagtccatcagcaccgcctacctgcaatggagcagcctgaaggcctcggacaccgccatgtattactgtgcacgcagctactatagtaactcttactggtacttcgatctctggggccgcggcaccctggtcaccgtctcctcggctagcgaaattgtgttgacacagtctccagccaccctgtctttgtctccaggtgaaagagccaccctctcctgcagggccagtcagagtgttagctacattgtttggtaccaacagaaacctggccaggcacctaggctcctcatctatgccccatccaacctggcttctggaataccagccaggttcagtggcagtggatccgggacagacttcactctcaccatcagcagtcttgagcctgaagattttgcagtttattactgtcagcagtggagttttaaccctcccacgttcggccaagggaccaaggtggaaatcaaatga

SEQ ID NO: 393 - protein, 493 aa, Artificial sequence
  Synthetic polypeptide DNE090 - VK3 leader through VK3
  MISC_FEATURE (1)..(20): Leader sequence
  MISC_FEATURE (21)..(23): Junction
  MISC_FEATURE (24)..(38): Hinge region (Linker)
  MISC_FEATURE (39)..(255): CH2CH3 region
  MISC_FEATURE (256)..(263): PIMS linker
  MISC_FEATURE (264)..(293): Heavy region
  MISC_FEATURE (294)..(298): Heavy chain CDR sub-domain
  MISC_FEATURE (299)..(312): Heavy region
  MISC_FEATURE (313)..(329): Heavy chain CDR bus-domain
  MISC_FEATURE (330)..(361): Heavy region
  MISC_FEATURE (362)..(373): Heavy chain CDR sub-domain
  MISC_FEATURE (374)..(384): Heavy region
  MISC_FEATURE (385)..(386): Hinge region (Linker)
  MISC_FEATURE (387)..(409): Light region
  MISC_FEATURE (410)..(419): Light chain CDR sub-domain
  MISC_FEATURE (420)..(434): Light region
  MISC_FEATURE (435)..(441): Light chain CDR sub-domain
  MISC_FEATURE (442)..(473): Light region
  MISC_FEATURE (474)..(482): Light chain CDR sub-domain
  MISC_FEATURE (483)..(492): Light region
  MISC_FEATURE (493)..(493): Xaa is a stop codon
MEAPAQLLFLLLLWLPDTTGSSSEPKSSDKTHTCPPCPAPELLGGPSVFLFPPKPKDTLMISRTPEVTCVVVDVSHEDPEVKFNWYVDGVEVHNAKTKPREEQYNSTYRVVSVLTVLHQDWLNGKEYKCKVSNKALPAPIEKTISKAKGQPREPQVYTLPPSRDELTKNQVSLTCLVKGFYPSDIAVEWESNGQPENNYKTTPPVLDSDGSFFLYSKLTVDKSRWQQGNVFSCSVMHEALHNHYTQKSLSLSPGKGCPPCPNSEVQLVQSGAEVKKPGESLKISCKGSGYSFTSYNMHWVRQMPGKGLEWMGAIYPGNGDTSYNQKFKGQVTISADKSISTAYLQWSSLKASDTAMYYCARSYYSNSYWYFDLWGRGTLVTVSSASEIVLTQSPATLSLSPGERATLSCRASQSVSYIVWYQQKPGQAPRLLIYAPSNLASGIPARFSGSGSGTDFTLTISSLEPEDFAVYYCQQWSFNPPTFGQGTKVEIKX

SEQ ID NO: 394 - DNA, 1494 bp, Artificial sequence
  Synthetic polynucleotide DNE091 - human VK3 leader through VK3
atggaagcaccagcgcagcttctcttcctcctgctactctggctcccagataccaccggttcctcgagcgagcccaaatcttctgacaaaactcacacatgcccaccgtgcccagcacctgaactcctgggtggaccgtcagtcttcctcttccccccaaaacccaaggacaccctcatgatctcccggacccctgaggtcacatgcgtggtggtggacgtgagccacgaagaccctgaggtcaagttcaactggtacgtggacggcgtggaggtgcataatgccaagacaaagccgcgggaggagcagtacaacagcacgtaccgtgtggtcagcgtcctcaccgtcctgcaccaggactggctgaatggcaaggagtacaagtgcaaggtctccaacaaagccctcccagcccccatcgagaaaaccatctccaaagccaaagggcagccccgagaaccacaggtgtacaccctgcccccatcccgggatgagctgaccaagaaccaggtcagcctgacctgcctggtcaaaggcttctatccaagcgacatcgccgtggagtgggagagcaatgggcagccggagaacaactacaagaccacgcctcccgtgctggactccgacggctccttcttcctctacagcaagctcaccgtggacaagagcaggtggcagcaggggaacgtcttctcatgctccgtgatgcatgaggctctgcacaaccactacacgcagaagagcctctccctgtctccgggtaaggggtgtccaccttgtccgaattctgaggtgcagctggtgcagtctggagcagaggtgaaaaagcccggagagtctctgaagatttcctgtaagggatccggatacagctttaccagctacaacatgcactgggtgcgccagatgcccgggaaaggcctagagtggatgggggctatctatcctggaaatggtgatacatcctacaatcagaagttcaagggccaggtcactatctcggccgacaagtccatcagcaccgcctacctgcaatggagcagcctgaaggcctcggacaccgccatgtattactgtgcacgcagctactatagtaactcttactggtacttcgatctctggggccgcggcaccctggtcaccgtctcctcggggggcggtggatcggctagcgaaattgtgttgacacagtctccagccaccctgtctttgtctccaggtgaaagagccaccctctcctgcagggccagtcagagtgttagctacattgtttggtaccaacagaaacctggccaggcacctaggctcctcatctatgccccatccaacctggcttctggaataccagccaggttcagtggcagtggatccgggacagacttcactctcaccatcagcagtcttgagcctgaagattttgcagtttattactgtcagcagtggagttttaaccctcccacgttcggccaagggaccaaggtggaaatcaaatga

SEQ ID NO: 395 - protein, 498 aa, Artificial sequence
  Synthetic polypeptide DNE091 - VK3 leader through VK3
  MISC_FEATURE (1)..(20): Leader sequence
  MISC_FEATURE (21)..(23): Junction
  MISC_FEATURE (24)..(38): Hinge region (Linker)
  MISC_FEATURE (39)..(255): CH2CH3 region
  MISC_FEATURE (256)..(263): PIMS linker
  MISC_FEATURE (264)..(293): Heavy region
  MISC_FEATURE (294)..(298): Heavy chain CDR sub-domain
  MISC_FEATURE (299)..(312): Heavy region
  MISC_FEATURE (313)..(329): Heavy chain CDR sub-domain
  MISC_FEATURE (330)..(361): Heavy region
  MISC_FEATURE (362)..(373): Heavy chain CDR sub-domain
  MISC_FEATURE (374)..(384): Heavy region
  MISC_FEATURE (385)..(391): Hinge region (Linker)
  MISC_FEATURE (392)..(414): Light region
  MISC_FEATURE (415)..(424): Light chain CDR sub-domain
  MISC_FEATURE (425)..(439): Light region
  MISC_FEATURE (440)..(446): Light chain CDR sub-domain
  MISC_FEATURE (447)..(478): Light region
  MISC_FEATURE (479)..(487): Light chain CDR sub-domain
  MISC_FEATURE (488)..(497): Light region
  MISC_FEATURE (498)..(498): Xaa is a stop codon
MEAPAQLLFLLLLWLPDTTGSSSEPKSSDKTHTCPPCPAPELLGGPSVFLFPPKPKDTLMISRTPEVTCVVVDVSHEDPEVKFNWYVDGVEVHNAKTKPREEQYNSTYRVVSVLTVLHQDWLNGKEYKCKVSNKALPAPIEKTISKAKGQPREPQVYTLPPSRDELTKNQVSLTCLVKGFYPSDIAVEWESNGQPENNYKTTPPVLDSDGSFFLYSKLTVDKSRWQQGNVFSCSVMHEALHNHYTQKSLSLSPGKGCPPCPNSEVQLVQSGAEVKKPGESLKISCKGSGYSFTSYNMHWVRQMPGKGLEWMGAIYPGNGDTSYNQKFKGQVTISADKSISTAYLQWSSLKASDTAMYYCARSYYSNSYWYFDLWGRGTLVTVSSGGGGSASEIVLTQSPATLSLSPGERATLSCRASQSVSYIVWYQQKPGQAPRLLIYAPSNLASGIPARFSGSGSGTDFTLTISSLEPEDFAVYYCQQWSFNPPTFGQGTKVEIKX

SEQ ID NO: 396 - DNA, 1509 bp, Artificial sequence
  Synthetic polynucleotide DNE092 - VK3 leader through VK3
atggaagcaccagcgcagcttctcttcctcctgctactctggctcccagataccaccggttcctcgagcgagcccaaatcttctgacaaaactcacacatgcccaccgtgcccagcacctgaactcctgggtggaccgtcagtcttcctcttccccccaaaacccaaggacaccctcatgatctcccggacccctgaggtcacatgcgtggtggtggacgtgagccacgaagaccctgaggtcaagttcaactggtacgtggacggcgtggaggtgcataatgccaagacaaagccgcgggaggagcagtacaacagcacgtaccgtgtggtcagcgtcctcaccgtcctgcaccaggactggctgaatggcaaggagtacaagtgcaaggtctccaacaaagccctcccagcccccatcgagaaaaccatctccaaagccaaagggcagccccgagaaccacaggtgtacaccctgcccccatcccgggatgagctgaccaagaaccaggtcagcctgacctgcctggtcaaaggcttctatccaagcgacatcgccgtggagtgggagagcaatgggcagccggagaacaactacaagaccacgcctcccgtgctggactccgacggctccttcttcctctacagcaagctcaccgtggacaagagcaggtggcagcaggggaacgtcttctcatgctccgtgatgcatgaggctctgcacaaccactacacgcagaagagcctctccctgtctccgggtaaggggtgtccaccttgtccgaattctgaggtgcagctggtgcagtctggagcagaggtgaaaaagcccggagagtctctgaagatttcctgtaagggatccggatacagctttaccagctacaacatgcactgggtgcgccagatgcccgggaaaggcctagagtggatgggggctatctatcctggaaatggtgatacatcctacaatcagaagttcaagggccaggtcactatctcggccgacaagtccatcagcaccgcctacctgcaatggagcagcctgaaggcctcggacaccgccatgtattactgtgcacgcagctactatagtaactcttactggtacttcgatctctggggccgcggcaccctggtcaccgtctcctcggggggcggtggatcgggcggtggtggatctgctagcgaaattgtgttgacacagtctccagccaccctgtctttgtctccaggtgaaagagccaccctctcctgcagggccagtcagagtgttagctacattgtttggtaccaacagaaacctggccaggcacctaggctcctcatctatgccccatccaacctggcttctggaataccagccaggttcagtggcagtggatccgggacagacttcactctcaccatcagcagtcttgagcctgaagattttgcagtttattactgtcagcagtggagttttaaccctcccacgttcggccaagggaccaaggtggaaatcaaatga

SEQ ID NO: 397 - protein, 503 aa, Artificial sequence
  Synthetic polypeptide DNE092 - VK3 leader through VK3
  MISC_FEATURE (1)..(20): Leader sequence
  MISC_FEATURE (21)..(23): Junction
  MISC_FEATURE (24)..(38): Hinge region (Linker)
  MISC_FEATURE (39)..(255): CH2CH3 region
  MISC_FEATURE (256)..(263): PIMS linker
  MISC_FEATURE (264)..(293): Heavy region
  MISC_FEATURE (294)..(298): Heavy chain CDR sub-domain
  MISC_FEATURE (299)..(312): Heavy region
  MISC_FEATURE (313)..(329): Heavy chain CDR sub-domain
  MISC_FEATURE (330)..(361): Heavy region
  MISC_FEATURE (362)..(373): Heavy chain CDR sub-domain
  MISC_FEATURE (374)..(384): Heavy region
  MISC_FEATURE (385)..(396): Hinge region (Linker)
  MISC_FEATURE (397)..(419): Light region
  MISC_FEATURE (420)..(429): Light chain CDR sub-domain
  MISC_FEATURE (430)..(444): Light region
  MISC_FEATURE (445)..(451): Light chain CDR sub-domain
  MISC_FEATURE (452)..(483): Light region
  MISC_FEATURE (484)..(492): Light chain CDR sub-domain
  MISC_FEATURE (493)..(502): Light region
  MISC_FEATURE (503)..(503): Xaa is a stop codon
MEAPAQLLFLLLLWLPDTTGSSSEPKSSDKTHTCPPCPAPELLGGPSVFLFPPKPKDTLMISRTPEVTCVVVDVSHEDPEVKFNWYVDGVEVHNAKTKPREEQYNSTYRVVSVLTVLHQDWLNGKEYKCKVSNKALPAPIEKTISKAKGQPREPQVYTLPPSRDELTKNQVSLTCLVKGFYPSDIAVEWESNGQPENNYKTTPPVLDSDGSFFLYSKLTVDKSRWQQGNVFSCSVMHEALHNHYTQKSLSLSPGKGCPPCPNSEVQLVQSGAEVKKPGESLKISCKGSGYSFTSYNMHWVRQMPGKGLEWMGAIYPGNGDTSYNQKFKGQVTISADKSISTAYLQWSSLKASDTAMYYCARSYYSNSYWYFDLWGRGTLVTVSSGGGGSGGGGSASEIVLTQSPATLSLSPGERATLSCRASQSVSYIVWYQQKPGQAPRLLIYAPSNLASGIPARFSGSGSGTDFTLTISSLEPEDFAVYYCQQWSFNPPTFGQGTKVEIKX

SEQ ID NO: 398 - DNA, 1524 bp, Artificial sequence
  Synthetic polynucleotide DNE093 - human VK3 leader through VK3
atggaagcaccagcgcagcttctcttcctcctgctactctggctcccagataccaccggttcctcgagcgagcccaaatcttctgacaaaactcacacatgcccaccgtgcccagcacctgaactcctgggtggaccgtcagtcttcctcttccccccaaaacccaaggacaccctcatgatctcccggacccctgaggtcacatgcgtggtggtggacgtgagccacgaagaccctgaggtcaagttcaactggtacgtggacggcgtggaggtgcataatgccaagacaaagccgcgggaggagcagtacaacagcacgtaccgtgtggtcagcgtcctcaccgtcctgcaccaggactggctgaatggcaaggagtacaagtgcaaggtctccaacaaagccctcccagcccccatcgagaaaaccatctccaaagccaaagggcagccccgagaaccacaggtgtacaccctgcccccatcccgggatgagctgaccaagaaccaggtcagcctgacctgcctggtcaaaggcttctatccaagcgacatcgccgtggagtgggagagcaatgggcagccggagaacaactacaagaccacgcctcccgtgctggactccgacggctccttcttcctctacagcaagctcaccgtggacaagagcaggtggcagcaggggaacgtcttctcatgctccgtgatgcatgaggctctgcacaaccactacacgcagaagagcctctccctgtctccgggtaaggggtgtccaccttgtccgaattctgaggtgcagctggtgcagtctggagcagaggtgaaaaagcccggagagtctctgaagatttcctgtaagggatccggatacagctttaccagctacaacatgcactgggtgcgccagatgcccgggaaaggcctagagtggatgggggctatctatcctggaaatggtgatacatcctacaatcagaagttcaagggccaggtcactatctcggccgacaagtccatcagcaccgcctacctgcaatggagcagcctgaaggcctcggacaccgccatgtattactgtgcacgcagctactatagtaactcttactggtacttcgatctctggggccgcggcaccctggtcaccgtctcctcggggggcggtggatcgggcggtggtggatctggaggaggtgggtctgctagcgaaattgtgttgacacagtctccagccaccctgtctttgtctccaggtgaaagagccaccctctcctgcagggccagtcagagtgttagctacattgtttggtaccaacagaaacctggccaggcacctaggctcctcatctatgccccatccaacctggcttctggaataccagccaggttcagtggcagtggatccgggacagacttcactctcaccatcagcagtcttgagcctgaagattttgcagtttattactgtcagcagtggagttttaaccctcccacgttcggccaagggaccaaggtggaaatcaaatga

SEQ ID NO: 399 - protein, 508 aa, Artificial sequence
  Synthetic polypeptide DNE093 - VK3 leader through VK3
  MISC_FEATURE (1)..(20): Leader sequence
  MISC_FEATURE (21)..(23): Junction
  MISC_FEATURE (24)..(38): Hinge region (Linker)
  MISC_FEATURE (39)..(255): CH2CH3 region
  MISC_FEATURE (256)..(263): PIMS linker
  MISC_FEATURE (264)..(293): Heavy region
  MISC_FEATURE (294)..(298): Heavy chain CDR sub-domain
  MISC_FEATURE (299)..(312): Heavy region
  MISC_FEATURE (313)..(329): Heavy chain CDR sub-domain
  MISC_FEATURE (330)..(361): Heavy region
  MISC_FEATURE (362)..(373): Heavy chain CDR sub-domain
  MISC_FEATURE (374)..(384): Heavy region
  MISC_FEATURE (385)..(401): Hinge region (Linker)
  MISC_FEATURE (402)..(424): Light region
  MISC_FEATURE (425)..(434): Light chain CDR sub-domain
  MISC_FEATURE (435)..(449): Light region
  MISC_FEATURE (450)..(456): Light chain CDR sub-domain
  MISC_FEATURE (457)..(488): Light region
  MISC_FEATURE (489)..(497): Light chain CDR sub-domain
  MISC_FEATURE (498)..(507): Light region
  MISC_FEATURE (508)..(508): Xaa is a stop codon
MEAPAQLLFLLLLWLPDTTGSSSEPKSSDKTHTCPPCPAPELLGGPSVFLFPPKPKDTLMISRTPEVTCVVVDVSHEDPEVKFNWYVDGVEVHNAKTKPREEQYNSTYRVVSVLTVLHQDWLNGKEYKCKVSNKALPAPIEKTISKAKGQPREPQVYTLPPSRDELTKNQVSLTCLVKGFYPSDIAVEWESNGQPENNYKTTPPVLDSDGSFFLYSKLTVDKSRWQQGNVFSCSVMHEALHNHYTQKSLSLSPGKGCPPCPNSEVQLVQSGAEVKKPGESLKISCKGSGYSFTSYNMHWVRQMPGKGLEWMGAIYPGNGDTSYNQKFKGQVTISADKSISTAYLQWSSLKASDTAMYYCARSYYSNSYWYFDLWGRGTLVTVSSGGGGSGGGGSGGGGSASEIVLTQSPATLSLSPGERATLSCRASQSVSYIVWYQQKPGQAPRLLIYAPSNLASGIPARFSGSGSGTDFTLTISSLEPEDFAVYYCQQWSFNPPTFGQGTKVEIKX

SEQ ID NO: 400 - DNA, 1539 bp, Artificial sequence
  Synthetic polynucleotide DNE094 - human VK3 leader through VK3
atggaagcaccagcgcagcttctcttcctcctgctactctggctcccagataccaccggttcctcgagcgagcccaaatcttctgacaaaactcacacatgcccaccgtgcccagcacctgaactcctgggtggaccgtcagtcttcctcttccccccaaaacccaaggacaccctcatgatctcccggacccctgaggtcacatgcgtggtggtggacgtgagccacgaagaccctgaggtcaagttcaactggtacgtggacggcgtggaggtgcataatgccaagacaaagccgcgggaggagcagtacaacagcacgtaccgtgtggtcagcgtcctcaccgtcctgcaccaggactggctgaatggcaaggagtacaagtgcaaggtctccaacaaagccctcccagcccccatcgagaaaaccatctccaaagccaaagggcagccccgagaaccacaggtgtacaccctgcccccatcccgggatgagctgaccaagaaccaggtcagcctgacctgcctggtcaaaggcttctatccaagcgacatcgccgtggagtgggagagcaatgggcagccggagaacaactacaagaccacgcctcccgtgctggactccgacggctccttcttcctctacagcaagctcaccgtggacaagagcaggtggcagcaggggaacgtcttctcatgctccgtgatgcatgaggctctgcacaaccactacacgcagaagagcctctccctgtctccgggtaaggggtgtccaccttgtccgaattctgaggtgcagctggtgcagtctggagcagaggtgaaaaagcccggagagtctctgaagatttcctgtaagggatccggatacagctttaccagctacaacatgcactgggtgcgccagatgcccgggaaaggcctagagtggatgggggctatctatcctggaaatggtgatacatcctacaatcagaagttcaagggccaggtcactatctcggccgacaagtccatcagcaccgcctacctgcaatggagcagcctgaaggcctcggacaccgccatgtattactgtgcacgcagctactatagtaactcttactggtacttcgatctctggggccgcggcaccctggtcaccgtctcctcggggggcggtggatcgggcggtggtggatctggaggaggtgggtctgggggcggtggatcggctagcgaaattgtgttgacacagtctccagccaccctgtctttgtctccaggtgaaagagccaccctctcctgcagggccagtcagagtgttagctacattgtttggtaccaacagaaacctggccaggcacctaggctcctcatctatgccccatccaacctggcttctggaataccagccaggttcagtggcagtggatccgggacagacttcactctcaccatcagcagtcttgagcctgaagattttgcagtttattactgtcagcagtggagttttaaccctcccacgttcggccaagggaccaaggtggaaatcaaatga

SEQ ID NO: 401 - protein, 513 aa, Artificial sequence
  Synthetic polypeptide DNE094 - VK3 leader through VK3
  MISC_FEATURE (1)..(20): Leader sequence
  MISC_FEATURE (21)..(23): Junction
  MISC_FEATURE (24)..(38): Hinge region (Linker)
  MISC_FEATURE (39)..(255): CH2CH3 region
  MISC_FEATURE (256)..(263): PIMS linker
  MISC_FEATURE (264)..(293): Heavy region
  MISC_FEATURE (294)..(298): Heavy chain CDR sub-domain
  MISC_FEATURE (299)..(312): Heavy region
  MISC_FEATURE (313)..(329): Heavy chain CDR sub-domain
  MISC_FEATURE (330)..(361): Heavy region
  MISC_FEATURE (362)..(373): Heavy chain CDR sub-domain
  MISC_FEATURE (374)..(384): Heavy region
  MISC_FEATURE (385)..(406): Hinge region (Linker)
  MISC_FEATURE (407)..(429): Light region
  MISC_FEATURE (430)..(439): Light chain CDR sub-domain
  MISC_FEATURE (440)..(454): Light region
  MISC_FEATURE (455)..(461): Light chain CDR sub-domain
  MISC_FEATURE (462)..(493): Light region
  MISC_FEATURE (494)..(502): Light chain CDR sub-domain
  MISC_FEATURE (503)..(512): Light region
  MISC_FEATURE (513)..(513): Xaa is a stop codon
MEAPAQLLFLLLLWLPDTTGSSSEPKSSDKTHTCPPCPAPELLGGPSVFLFPPKPKDTLMISRTPEVTCVVVDVSHEDPEVKFNWYVDGVEVHNAKTKPREEQYNSTYRVVSVLTVLHQDWLNGKEYKCKVSNKALPAPIEKTISKAKGQPREPQVYTLPPSRDELTKNQVSLTCLVKGFYPSDIAVEWESNGQPENNYKTTPPVLDSDGSFFLYSKLTVDKSRWQQGNVFSCSVMHEALHNHYTQKSLSLSPGKGCPPCPNSEVQLVQSGAEVKKPGESLKISCKGSGYSFTSYNMHWVRQMPGKGLEWMGAIYPGNGDTSYNQKFKGQVTISADKSISTAYLQWSSLKASDTAMYYCARSYYSNSYWYFDLWGRGTLVTVSSGGGGSGGGGSGGGGSGGGGSASEIVLTQSPATLSLSPGERATLSCRASQSVSYIVWYQQKPGQAPRLLIYAPSNLASGIPARFSGSGSGTDFTLTISSLEPEDFAVYYCQQWSFNPPTFGQGTKVEIKX

SEQ ID NO: 402 - DNA, 1554 bp, Artificial sequence
  Synthetic polynucleotide DNE095 - human VK3 leader through VK3
atggaagcaccagcgcagcttctcttcctcctgctactctggctcccagataccaccggttcctcgagcgagcccaaatcttctgacaaaactcacacatgcccaccgtgcccagcacctgaactcctgggtggaccgtcagtcttcctcttccccccaaaacccaaggacaccctcatgatctcccggacccctgaggtcacatgcgtggtggtggacgtgagccacgaagaccctgaggtcaagttcaactggtacgtggacggcgtggaggtgcataatgccaagacaaagccgcgggaggagcagtacaacagcacgtaccgtgtggtcagcgtcctcaccgtcctgcaccaggactggctgaatggcaaggagtacaagtgcaaggtctccaacaaagccctcccagcccccatcgagaaaaccatctccaaagccaaagggcagccccgagaaccacaggtgtacaccctgcccccatcccgggatgagctgaccaagaaccaggtcagcctgacctgcctggtcaaaggcttctatccaagcgacatcgccgtggagtgggagagcaatgggcagccggagaacaactacaagaccacgcctcccgtgctggactccgacggctccttcttcctctacagcaagctcaccgtggacaagagcaggtggcagcaggggaacgtcttctcatgctccgtgatgcatgaggctctgcacaaccactacacgcagaagagcctctccctgtctccgggtaaggggtgtccaccttgtccgaattctgaggtgcagctggtgcagtctggagcagaggtgaaaaagcccggagagtctctgaagatttcctgtaagggatccggatacagctttaccagctacaacatgcactgggtgcgccagatgcccgggaaaggcctagagtggatgggggctatctatcctggaaatggtgatacatcctacaatcagaagttcaagggccaggtcactatctcggccgacaagtccatcagcaccgcctacctgcaatggagcagcctgaaggcctcggacaccgccatgtattactgtgcacgcagctactatagtaactcttactggtacttcgatctctggggccgcggcaccctggtcaccgtctcctcggggggcggtggatcgggcggtggtggatctggaggaggtgggtctgggggcggtggatcgggcggtggtggatctgctagcgaaattgtgttgacacagtctccagccaccctgtctttgtctccaggtgaaagagccaccctctcctgcagggccagtcagagtgttagctacattgtttggtaccaacagaaacctggccaggcacctaggctcctcatctatgccccatccaacctggcttctggaataccagccaggttcagtggcagtggatccgggacagacttcactctcaccatcagcagtcttgagcctgaagattttgcagtttattactgtcagcagtggagttttaaccctcccacgttcggccaagggaccaaggtggaaatcaaatga

SEQ ID NO: 403 - protein, 518 aa, Artificial sequence
  Synthetic polypeptide DNE095 - VK3 leader through VK3
  MISC_FEATURE (1)..(20): Leader sequence
  MISC_FEATURE (21)..(23): Junction
  MISC_FEATURE (24)..(38): Hinge region (Linker)
  MISC_FEATURE (39)..(255): CH2CH3 region
  MISC_FEATURE (256)..(263): PIMS linker
  MISC_FEATURE (264)..(293): Heavy region
  MISC_FEATURE (294)..(298): Heavy chain CDR sub-domain
  MISC_FEATURE (299)..(312): Heavy region
  MISC_FEATURE (313)..(329): Heavy chain CDR sub-domain
  MISC_FEATURE (330)..(361): Heavy region
  MISC_FEATURE (362)..(373): Heavy chain CDR sub-domain
  MISC_FEATURE (374)..(384): Heavy region
  MISC_FEATURE (385)..(411): Hinge region (Linker)
  MISC_FEATURE (412)..(434): Light region
  MISC_FEATURE (435)..(444): Light chain CDR sub-domain
  MISC_FEATURE (445)..(459): Light region
  MISC_FEATURE (460)..(466): Light chain CDR sub-domain
  MISC_FEATURE (467)..(498): Light region
  MISC_FEATURE (499)..(507): Light chain CDR sub-domain
  MISC_FEATURE (508)..(517): Light region
  MISC_FEATURE (518)..(518): Xaa is a stop codon
MEAPAQLLFLLLLWLPDTTGSSSEPKSSDKTHTCPPCPAPELLGGPSVFLFPPKPKDTLMISRTPEVTCVVVDVSHEDPEVKFNWYVDGVEVHNAKTKPREEQYNSTYRVVSVLTVLHQDWLNGKEYKCKVSNKALPAPIEKTISKAKGQPREPQVYTLPPSRDELTKNQVSLTCLVKGFYPSDIAVEWESNGQPENNYKTTPPVLDSDGSFFLYSKLTVDKSRWQQGNVFSCSVMHEALHNHYTQKSLSLSPGKGCPPCPNSEVQLVQSGAEVKKPGESLKISCKGSGYSFTSYNMHWVRQMPGKGLEWMGAIYPGNGDTSYNQKFKGQVTISADKSISTAYLQWSSLKASDTAMYYCARSYYSNSYWYFDLWGRGTLVTVSSGGGGSGGGGSGGGGSGGGGSGGGGSASEIVLTQSPATLSLSPGERATLSCRASQSVSYIVWYQQKPGQAPRLLIYAPSNLASGIPARFSGSGSGTDFTLTISSLEPEDFAVYYCQQWSFNPPTFGQGTKVEIKX

SEQ ID NO: 404 - DNA, 1536 bp, Artificial sequence
  Synthetic polynucleotide W0012 nucleotide sequence - full length sequence
atggaagcaccagcgcagcttctcttcctcctgctactctggctcccagataccaccggttcctcgagcgagcccaaatcttctgacaaaactcacacatgcccaccgtgcccagcacctgaactcctgggtggaccgtcagtcttcctcttccccccaaaacccaaggacaccctcatgatctcccggacccctgaggtcacatgcgtggtggtggacgtgagccacgaagaccctgaggtcaagttcaactggtacgtggacggcgtggaggtgcataatgccaagacaaagccgcgggaggagcagtacaacagcacgtaccgtgtggtcagcgtcctcaccgtcctgcaccaggactggctgaatggcaaggagtacaagtgcaaggtctccaacaaagccctcccagcccccatcgagaaaaccatctccaaagccaaagggcagccccgagaaccacaggtgtacaccctgcccccatcccgggatgagctgaccaagaaccaggtcagcctgacctgcctggtcaaaggcttctatccaagcgacatcgccgtggagtgggagagcaatgggcagccggagaacaactacaagaccacgcctcccgtgctggactccgacggctccttcttcctctacagcaagctcaccgtggacaagagcaggtggcagcaggggaacgtcttctcatgctccgtgatgcatgaggctctgcacaaccactacacgcagaagagcctctccctgtctccgggtaaggggtgtccaccttgtccgaattctgaggtgcagctggtgcagtctggagcagaggtgaaaaagcccggagagtctctgaagatttcctgtaagggctccggttactcattcactggctacaatatgaactgggtgcgccagatgcccgggaaaggccttgagtggatgggcaatattgatccttattatggtggtactacctacaaccggaagttcaagggccaggtcactatctccgccgacaagtccatcagcaccgcctacctgcaatggagcagcctgaaggcctcggacaccgccatgtattactgtgcacgctcagtcggccctttcgactcctggggccagggcaccctggtcactgtctcctctgggggtggaggctctggtggcggtggctctggcggaggtggatccggtggcggcggatctggcgggggtggctctgaaattgtgttgacacagtctccagccaccctgtctttgtctccaggcgaaagagccaccctctcctgccgagcaagtgaaaatgtttacagctacttagcctggtaccaacagaaacctggccaggctcctaggctcctcatctattttgcaaaaaccttagcagaaggtattccagccaggttcagtggcagtggctccgggacagacttcactctcaccatcagcagcctagagcctgaagattttgcagtttattactgtcaacatcattccgataatccgtggacattcggccaagggaccaaggtggaaatcaaatga

SEQ ID NO: 405 - protein, 512 aa, Artificial sequence
  Synthetic polypeptide W0012 amino acid sequence - full length sequence
  MISC_FEATURE (1)..(20): Leader sequence
  MISC_FEATURE (21)..(23): Junction
  MISC_FEATURE (24)..(38): Hinge region (Linker)
  MISC_FEATURE (39)..(255): CH2CH3 region
  MISC_FEATURE (256)..(263): PIMS linker
  MISC_FEATURE (264)..(288): Heavy region
  MISC_FEATURE (289)..(296): Heavy chain CDR sub-domaini
  MISC_FEATURE (297)..(321): Heavy region
  MISC_FEATURE (322)..(328): Heavy chain CDR sub-domain
  MISC_FEATURE (329)..(359): Heavy region
  MISC_FEATURE (360)..(368): Heavy chain CDR sub-domain
  MISC_FEATURE (369)..(379): Heavy region
  MISC_FEATURE (380)..(404): Hinge region (Linker)
  MISC_FEATURE (405)..(430): Light region
  MISC_FEATURE (431)..(436): Light chain CDR sub-domain
  MISC_FEATURE (437)..(456): Light region
  MISC_FEATURE (457)..(469): Light chain CDR sub-domain
  MISC_FEATURE (470)..(492): Light region
  MISC_FEATURE (493)..(501): Light chain CDR sub-domain
  MISC_FEATURE (502)..(511): Light region
  MISC_FEATURE (512)..(512): Xaa is a stop codon
MEAPAQLLFLLLLWLPDTTGSSSEPKSSDKTHTCPPCPAPELLGGPSVFLFPPKPKDTLMISRTPEVTCVVVDVSHEDPEVKFNWYVDGVEVHNAKTKPREEQYNSTYRVVSVLTVLHQDWLNGKEYKCKVSNKALPAPIEKTISKAKGQPREPQVYTLPPSRDELTKNQVSLTCLVKGFYPSDIAVEWESNGQPENNYKTTPPVLDSDGSFFLYSKLTVDKSRWQQGNVFSCSVMHEALHNHYTQKSLSLSPGKGCPPCPNSEVQLVQSGAEVKKPGESLKISCKGSGYSFTGYNMNWVRQMPGKGLEWMGNIDPYYGGTTYNRKFKGQVTISADKSISTAYLQWSSLKASDTAMYYCARSVGPFDSWGQGTLVTVSSGGGGSGGGGSGGGGSGGGGSGGGGSEIVLTQSPATLSLSPGERATLSCRASENVYSYLAWYQQKPGQAPRLLIYFAKTLAEGIPARFSGSGSGTDFTLTISSLEPEDFAVYYCQHHSDNPWTFGQGTKVEIKX

SEQ ID NO: 406 - DNA, 1491 bp, Artificial sequence
  Synthetic polynucleotide W0023 nucleotide sequence - full length sequence
atggaagcaccagcgcagcttctcttcctcctgctactctggctcccagataccaccggttcctcgagcgagcccaaatcttctgacaaaactcacacatgcccaccgtgcccagcacctgaactcctgggtggaccgtcagtcttcctcttccccccaaaacccaaggacaccctcatgatctcccggacccctgaggtcacatgcgtggtggtggacgtgagccacgaagaccctgaggtcaagttcaactggtacgtggacggcgtggaggtgcataatgccaagacaaagccgcgggaggagcagtacaacagcacgtaccgtgtggtcagcgtcctcaccgtcctgcaccaggactggctgaatggcaaggagtacaagtgcaaggtctccaacaaagccctcccagcccccatcgagaaaaccatctccaaagccaaagggcagccccgagaaccacaggtgtacaccctgcccccatcccgggatgagctgaccaagaaccaggtcagcctgacctgcctggtcaaaggcttctatccaagcgacatcgccgtggagtgggagagcaatgggcagccggagaacaactacaagaccacgcctcccgtgctggactccgacggctccttcttcctctacagcaagctcaccgtggacaagagcaggtggcagcaggggaacgtcttctcatgctccgtgatgcatgaggctctgcacaaccactacacgcagaagagcctctccctgtctccgggtaaggggtgtccaccttgtccgaattctgaggtgcagctggtgcagtctggagcagaggtgaaaaagcccggagagtctctgaagatttcctgtaagggctccggttactcattcactggctacaatatgaactgggtgcgccagatgcccgggaaaggccttgagtggatgggcaatattgatccttattatggtggtactacctacaaccggaagttcaagggccaggtcactatctccgccgacaagtccatcagcaccgcctacctgcaatggagcagcctgaaggcctcggacaccgccatgtattactgtgcacgctcagtcggccctttcgactcctggggccagggcaccctggtcactgtctcctctgggggtggaggctctggtggcggtggatccgaaattgtgttgacacagtctccagccaccctgtctttgtctccaggcgaaagagccaccctctcctgccgagcaagtgaaaatgtttacagctacttagcctggtaccaacagaaacctggccaggctcctaggctcctcatctattttgcaaaaaccttagcagaaggtattccagccaggttcagtggcagtggctccgggacagacttcactctcaccatcagcagcctagagcctgaagattttgcagtttattactgtcaacatcattccgataatccgtggacattcggccaagggaccaaggtggaaatcaaatga

SEQ ID NO: 407 - protein, 497 aa, Artificial sequence
  Synthetic polypeptide W0023 amino acid sequence - full length sequence
  MISC_FEATURE (1)..(20): Leader sequence
  MISC_FEATURE (21)..(23): Junction
  MISC_FEATURE (24)..(38): Hinge region (Linker)
  MISC_FEATURE (39)..(255): CH2CH3 region
  MISC_FEATURE (256)..(263): PIMS linker
  MISC_FEATURE (264)..(288): Heavy region
  MISC_FEATURE (289)..(296): Heavy chain CDR sub-domain
  MISC_FEATURE (297)..(321): Heavy region
  MISC_FEATURE (322)..(328): Heavy chain CDR sub-domain
  MISC_FEATURE (329)..(359): Heavy region
  MISC_FEATURE (360)..(368): Heavy chain CDR sub-domain
  MISC_FEATURE (369)..(379): Heavy region
  MISC_FEATURE (380)..(389): Hinge region (Linker)
  MISC_FEATURE (390)..(415): Light region
  MISC_FEATURE (416)..(421): Light chain CDR sub-domain
  MISC_FEATURE (422)..(441): Light region
  MISC_FEATURE (442)..(454): Light chain CDR sub-domain
  MISC_FEATURE (455)..(477): Light region
  MISC_FEATURE (478)..(486): Light chain CDR sub-domain
  MISC_FEATURE (487)..(496): Light region
  MISC_FEATURE (497)..(497): Xaa is a stop codon
MEAPAQLLFLLLLWLPDTTGSSSEPKSSDKTHTCPPCPAPELLGGPSVFLFPPKPKDTLMISRTPEVTCVVVDVSHEDPEVKFNWYVDGVEVHNAKTKPREEQYNSTYRVVSVLTVLHQDWLNGKEYKCKVSNKALPAPIEKTISKAKGQPREPQVYTLPPSRDELTKNQVSLTCLVKGFYPSDIAVEWESNGQPENNYKTTPPVLDSDGSFFLYSKLTVDKSRWQQGNVFSCSVMHEALHNHYTQKSLSLSPGKGCPPCPNSEVQLVQSGAEVKKPGESLKISCKGSGYSFTGYNMNWVRQMPGKGLEWMGNIDPYYGGTTYNRKFKGQVTISADKSISTAYLQWSSLKASDTAMYYCARSVGPFDSWGQGTLVTVSSGGGGSGGGGSEIVLTQSPATLSLSPGERATLSCRASENVYSYLAWYQQKPGQAPRLLIYFAKTLAEGIPARFSGSGSGTDFTLTISSLEPEDFAVYYCQHHSDNPWTFGQGTKVEIKX

SEQ ID NO: 408 - DNA, 1506 bp, Artificial sequence
  Synthetic polynucleotide W0024 nucleotide sequence - full length sequence
atggaagcaccagcgcagcttctcttcctcctgctactctggctcccagataccaccggttcctcgagcgagcccaaatcttctgacaaaactcacacatgcccaccgtgcccagcacctgaactcctgggtggaccgtcagtcttcctcttccccccaaaacccaaggacaccctcatgatctcccggacccctgaggtcacatgcgtggtggtggacgtgagccacgaagaccctgaggtcaagttcaactggtacgtggacggcgtggaggtgcataatgccaagacaaagccgcgggaggagcagtacaacagcacgtaccgtgtggtcagcgtcctcaccgtcctgcaccaggactggctgaatggcaaggagtacaagtgcaaggtctccaacaaagccctcccagcccccatcgagaaaaccatctccaaagccaaagggcagccccgagaaccacaggtgtacaccctgcccccatcccgggatgagctgaccaagaaccaggtcagcctgacctgcctggtcaaaggcttctatccaagcgacatcgccgtggagtgggagagcaatgggcagccggagaacaactacaagaccacgcctcccgtgctggactccgacggctccttcttcctctacagcaagctcaccgtggacaagagcaggtggcagcaggggaacgtcttctcatgctccgtgatgcatgaggctctgcacaaccactacacgcagaagagcctctccctgtctccgggtaaggggtgtccaccttgtccgaattctgaggtgcagctggtgcagtctggagcagaggtgaaaaagcccggagagtctctgaagatttcctgtaagggctccggttactcattcactggctacaatatgaactgggtgcgccagatgcccgggaaaggccttgagtggatgggcaatattgatccttattatggtggtactacctacaaccggaagttcaagggccaggtcactatctccgccgacaagtccatcagcaccgcctacctgcaatggagcagcctgaaggcctcggacaccgccatgtattactgtgcacgctcagtcggccctttcgactcctggggccagggcaccctggtcactgtctcctctgggggtggaggctctggtggcggtggctctggcggaggtggatccgaaattgtgttgacacagtctccagccaccctgtctttgtctccaggcgaaagagccaccctctcctgccgagcaagtgaaaatgtttacagctacttagcctggtaccaacagaaacctggccaggctcctaggctcctcatctattttgcaaaaaccttagcagaaggtattccagccaggttcagtggcagtggctccgggacagacttcactctcaccatcagcagcctagagcctgaagattttgcagtttattactgtcaacatcattccgataatccgtggacattcggccaagggaccaaggtggaaatcaaatga

SEQ ID NO: 409 - protein, 502 aa, Artificial sequence
  Synthetic polypeptide W0024 amino sequence - full length sequence
  MISC_FEATURE (1)..(20): Leader sequence
  MISC_FEATURE (21)..(23): Junction
  MISC_FEATURE (24)..(38): Hinge region (Linker)
  MISC_FEATURE (39)..(255): CH2CH3 region
  MISC_FEATURE (256)..(263): PIMS linker
  MISC_FEATURE (264)..(288): Heavy region
  MISC_FEATURE (289)..(296): Heavy chain CDR sub-domain
  MISC_FEATURE (297)..(321): Heavy region
  MISC_FEATURE (322)..(328): Heavy chain CDR sub-domain
  MISC_FEATURE (329)..(359): Heavy region
  MISC_FEATURE (360)..(368): Heavy chain CDR sub-domain
  MISC_FEATURE (369)..(379): Heavy region
  MISC_FEATURE (380)..(394): Hinge region (Linker)
  MISC_FEATURE (395)..(420): Light region
  MISC_FEATURE (421)..(426): Light chain CDR sub-domain
  MISC_FEATURE (427)..(446): Light region
  MISC_FEATURE (447)..(459): Light chain CDR sub-domain
  MISC_FEATURE (460)..(482): Light region
  MISC_FEATURE (483)..(491): Light chain CDR sub-domain
  MISC_FEATURE (492)..(501): Light region
  MISC_FEATURE (502)..(502): Xaa is a stop codon
MEAPAQLLFLLLLWLPDTTGSSSEPKSSDKTHTCPPCPAPELLGGPSVFLFPPKPKDTLMISRTPEVTCVVVDVSHEDPEVKFNWYVDGVEVHNAKTKPREEQYNSTYRVVSVLTVLHQDWLNGKEYKCKVSNKALPAPIEKTISKAKGQPREPQVYTLPPSRDELTKNQVSLTCLVKGFYPSDIAVEWESNGQPENNYKTTPPVLDSDGSFFLYSKLTVDKSRWQQGNVFSCSVMHEALHNHYTQKSLSLSPGKGCPPCPNSEVQLVQSGAEVKKPGESLKISCKGSGYSFTGYNMNWVRQMPGKGLEWMGNIDPYYGGTTYNRKFKGQVTISADKSISTAYLQWSSLKASDTAMYYCARSVGPFDSWGQGTLVTVSSGGGGSGGGGSGGGGSEIVLTQSPATLSLSPGERATLSCRASENVYSYLAWYQQKPGQAPRLLIYFAKTLAEGIPARFSGSGSGTDFTLTISSLEPEDFAVYYCQHHSDNPWTFGQGTKVEIKX

SEQ ID NO: 410 - DNA, 1521 bp, Artificial sequence
  Synthetic polynucleotide W0025 nucleotide sequence - full length sequence
atggaagcaccagcgcagcttctcttcctcctgctactctggctcccagataccaccggttcctcgagcgagcccaaatcttctgacaaaactcacacatgcccaccgtgcccagcacctgaactcctgggtggaccgtcagtcttcctcttccccccaaaacccaaggacaccctcatgatctcccggacccctgaggtcacatgcgtggtggtggacgtgagccacgaagaccctgaggtcaagttcaactggtacgtggacggcgtggaggtgcataatgccaagacaaagccgcgggaggagcagtacaacagcacgtaccgtgtggtcagcgtcctcaccgtcctgcaccaggactggctgaatggcaaggagtacaagtgcaaggtctccaacaaagccctcccagcccccatcgagaaaaccatctccaaagccaaagggcagccccgagaaccacaggtgtacaccctgcccccatcccgggatgagctgaccaagaaccaggtcagcctgacctgcctggtcaaaggcttctatccaagcgacatcgccgtggagtgggagagcaatgggcagccggagaacaactacaagaccacgcctcccgtgctggactccgacggctccttcttcctctacagcaagctcaccgtggacaagagcaggtggcagcaggggaacgtcttctcatgctccgtgatgcatgaggctctgcacaaccactacacgcagaagagcctctccctgtctccgggtaaggggtgtccaccttgtccgaattctgaggtgcagctggtgcagtctggagcagaggtgaaaaagcccggagagtctctgaagatttcctgtaagggctccggttactcattcactggctacaatatgaactgggtgcgccagatgcccgggaaaggccttgagtggatgggcaatattgatccttattatggtggtactacctacaaccggaagttcaagggccaggtcactatctccgccgacaagtccatcagcaccgcctacctgcaatggagcagcctgaaggcctcggacaccgccatgtattactgtgcacgctcagtcggccctttcgactcctggggccagggcaccctggtcactgtctcctctgggggtggaggctctggtggcggtggatccggtggcggcggatctggcgggggtggctctgaaattgtgttgacacagtctccagccaccctgtctttgtctccaggcgaaagagccaccctctcctgccgagcaagtgaaaatgtttacagctacttagcctggtaccaacagaaacctggccaggctcctaggctcctcatctattttgcaaaaaccttagcagaaggtattccagccaggttcagtggcagtggctccgggacagacttcactctcaccatcagcagcctagagcctgaagattttgcagtttattactgtcaacatcattccgataatccgtggacattcggccaagggaccaaggtggaaatcaaatga

SEQ ID NO: 411 - protein, 507 aa, Artificial sequence
  Synthetic polypeptide W0025 amino acid sequence - full length sequence
  MISC_FEATURE (1)..(20): Leader sequence
  MISC_FEATURE (21)..(23): Junction
  MISC_FEATURE (24)..(38): Hinge region (Linker)
  MISC_FEATURE (39)..(255): CH2CH3 region
  MISC_FEATURE (256)..(263): PIMS linker
  MISC_FEATURE (264)..(288): Heavy region
  MISC_FEATURE (289)..(296): Heavy chain CDR sub-domain
  MISC_FEATURE (297)..(321): Heavy region
  MISC_FEATURE (322)..(328): Heavy chain CDR sub-domain
  MISC_FEATURE (329)..(359): Heavy region
  MISC_FEATURE (360)..(368): Heavy chain CDR sub-domain
  MISC_FEATURE (369)..(379): Heavy region
  MISC_FEATURE (380)..(399): Hinge region (Linker)
  MISC_FEATURE (400)..(425): Light region
  MISC_FEATURE (426)..(431): Light chain CDR sub-domain
  MISC_FEATURE (432)..(451): Light region
  MISC_FEATURE (452)..(464): Light chain CDR sub-domain
  MISC_FEATURE (465)..(487): Light region
  MISC_FEATURE (488)..(496): Light chain CDR sub-domain
  MISC_FEATURE (497)..(506): Light region
  MISC_FEATURE (507)..(507): Xaa is a stop codon
MEAPAQLLFLLLLWLPDTTGSSSEPKSSDKTHTCPPCPAPELLGGPSVFLFPPKPKDTLMISRTPEVTCVVVDVSHEDPEVKFNWYVDGVEVHNAKTKPREEQYNSTYRVVSVLTVLHQDWLNGKEYKCKVSNKALPAPIEKTISKAKGQPREPQVYTLPPSRDELTKNQVSLTCLVKGFYPSDIAVEWESNGQPENNYKTTPPVLDSDGSFFLYSKLTVDKSRWQQGNVFSCSVMHEALHNHYTQKSLSLSPGKGCPPCPNSEVQLVQSGAEVKKPGESLKISCKGSGYSFTGYNMNWVRQMPGKGLEWMGNIDPYYGGTTYNRKFKGQVTISADKSISTAYLQWSSLKASDTAMYYCARSVGPFDSWGQGTLVTVSSGGGGSGGGGSGGGGSGGGGSEIVLTQSPATLSLSPGERATLSCRASENVYSYLAWYQQKPGQAPRLLIYFAKTLAEGIPARFSGSGSGTDFTLTISSLEPEDFAVYYCQHHSDNPWTFGQGTKVEIKX

SEQ ID NO: 412 - DNA, 1530 bp, Artificial sequence
  Synthetic polynucleotide W0062 nucleotide sequence - full length sequence
atggaagcaccagcgcagcttctcttcctcctgctactctggctcccagataccaccggttcctcgagcgagcccaaatcttctgacaaaactcacacatgcccaccgtgcccagcacctgaactcctgggtggaccgtcagtcttcctcttccccccaaaacccaaggacaccctcatgatctcccggacccctgaggtcacatgcgtggtggtggacgtgagccacgaagaccctgaggtcaagttcaactggtacgtggacggcgtggaggtgcataatgccaagacaaagccgcgggaggagcagtacaacagcacgtaccgtgtggtcagcgtcctcaccgtcctgcaccaggactggctgaatggcaaggagtacaagtgcaaggtctccaacaaagccctcccagcccccatcgagaaaaccatctccaaagccaaagggcagccccgagaaccacaggtgtacaccctgcccccatcccgggatgagctgaccaagaaccaggtcagcctgacctgcctggtcaaaggcttctatccaagcgacatcgccgtggagtgggagagcaatgggcagccggagaacaactacaagaccacgcctcccgtgctggactccgacggctccttcttcctctacagcaagctcaccgtggacaagagcaggtggcagcaggggaacgtcttctcatgctccgtgatgcatgaggctctgcacaaccactacacgcagaagagcctctccctgtctccgggttctccaccttctccgaattctgaggtgcagctggtgcagtctggagcagaggtgaaaaagcccggagagtctctgaagatttcctgtaagggctccggttactcattcactggctacaatatgaactgggtgcgccagatgcccgggaaaggccttgagtggatgggcaatattgatccttattatggtggtactacctacaaccggaagttcaagggccaggtcactatctccgccgacaagtccatcagcaccgcctacctgcaatggagcagcctgaaggcctcggacaccgccatgtattactgtgcacgctcagtcggccctttcgactcctggggccagggcaccctggtcactgtctcctctgggggtggaggctctggtggcggtggctctggcggaggtggatccggtggcggcggatctggcgggggtggctctgaaattgtgttgacacagtctccagccaccctgtctttgtctccaggcgaaagagccaccctctcctgccgagcaagtgaaaatgtttacagctacttagcctggtaccaacagaaacctggccaggctcctaggctcctcatctattttgcaaaaaccttagcagaaggtattccagccaggttcagtggcagtggctccgggacagacttcactctcaccatcagcagcctagagcctgaagattttgcagtttattactgtcaacatcattccgataatccgtggacattcggccaagggaccaaggtggaaatcaaatga

SEQ ID NO: 413 - protein, 510 aa, Artificial sequence
  Synthetic polypeptide W0062 amino acid sequence - full length sequence
  MISC_FEATURE (1)..(20): Leader sequence
  MISC_FEATURE (21)..(23): Junction
  MISC_FEATURE (24)..(38): Hinge region (Linker)
  MISC_FEATURE (39)..(254): CH2CH3 region
  MISC_FEATURE (255)..(261): PIMS linker
  MISC_FEATURE (262)..(286): Heavy region
  MISC_FEATURE (287)..(294): Heavy chain CDR sub-domain
  MISC_FEATURE (295)..(319): Heavy region
  MISC_FEATURE (320)..(326): Heavy chain CDR sub-domain
  MISC_FEATURE (327)..(357): Heavy region
  MISC_FEATURE (358)..(366): Heavy chain CDR sub-domain
  MISC_FEATURE (367)..(377): Heavy region
  MISC_FEATURE (378)..(402): Hinge region (Linker)
  MISC_FEATURE (403)..(428): Light region
  MISC_FEATURE (429)..(434): Light chain CDR sub-domain
  MISC_FEATURE (435)..(454): Light region
  MISC_FEATURE (455)..(467): Light chain CDR sub-domain
  MISC_FEATURE (468)..(490): Light region
  MISC_FEATURE (491)..(499): Light chain CDR sub-domain
  MISC_FEATURE (500)..(509): Light region
  MISC_FEATURE (510)..(510): Xaa is a stop codon
MEAPAQLLFLLLLWLPDTTGSSSEPKSSDKTHTCPPCPAPELLGGPSVFLFPPKPKDTLMISRTPEVTCVVVDVSHEDPEVKFNWYVDGVEVHNAKTKPREEQYNSTYRVVSVLTVLHQDWLNGKEYKCKVSNKALPAPIEKTISKAKGQPREPQVYTLPPSRDELTKNQVSLTCLVKGFYPSDIAVEWESNGQPENNYKTTPPVLDSDGSFFLYSKLTVDKSRWQQGNVFSCSVMHEALHNHYTQKSLSLSPGSPPSPNSEVQLVQSGAEVKKPGESLKISCKGSGYSFTGYNMNWVRQMPGKGLEWMGNIDPYYGGTTYNRKFKGQVTISADKSISTAYLQWSSLKASDTAMYYCARSVGPFDSWGQGTLVTVSSGGGGSGGGGSGGGGSGGGGSGGGGSEIVLTQSPATLSLSPGERATLSCRASENVYSYLAWYQQKPGQAPRLLIYFAKTLAEGIPARFSGSGSGTDFTLTISSLEPEDFAVYYCQHHSDNPWTFGQGTKVEIKX

SEQ ID NO: 414 - DNA, 1554 bp, Artificial sequence
  Synthetic polynucleotide W0063 nucleotide sequence - full length sequence
atggaagcaccagcgcagcttctcttcctcctgctactctggctcccagataccaccggttcctcgagcgagcccaaatcttctgacaaaactcacacatgcccaccgtgcccagcacctgaactcctgggtggaccgtcagtcttcctcttccccccaaaacccaaggacaccctcatgatctcccggacccctgaggtcacatgcgtggtggtggacgtgagccacgaagaccctgaggtcaagttcaactggtacgtggacggcgtggaggtgcataatgccaagacaaagccgcgggaggagcagtacaacagcacgtaccgtgtggtcagcgtcctcaccgtcctgcaccaggactggctgaatggcaaggagtacaagtgcaaggtctccaacaaagccctcccagcccccatcgagaaaaccatctccaaagccaaagggcagccccgagaaccacaggtgtacaccctgcccccatcccgggatgagctgaccaagaaccaggtcagcctgacctgcctggtcaaaggcttctatccaagcgacatcgccgtggagtgggagagcaatgggcagccggagaacaactacaagaccacgcctcccgtgctggactccgacggctccttcttcctctacagcaagctcaccgtggacaagagcaggtggcagcaggggaacgtcttctcatgctccgtgatgcatgaggctctgcacaaccactacacgcagaagagcctctccctgtctccgggtctgtctgtgaaagctgacttcctcactccatccatcgggaattctgaggtgcagctggtgcagtctggagcagaggtgaaaaagcccggagagtctctgaagatttcctgtaagggctccggttactcattcactggctacaatatgaactgggtgcgccagatgcccgggaaaggccttgagtggatgggcaatattgatccttattatggtggtactacctacaaccggaagttcaagggccaggtcactatctccgccgacaagtccatcagcaccgcctacctgcaatggagcagcctgaaggcctcggacaccgccatgtattactgtgcacgctcagtcggccctttcgactcctggggccagggcaccctggtcactgtctcctctgggggtggaggctctggtggcggtggctctggcggaggtggatccggtggcggcggatctggcgggggtggctctgaaattgtgttgacacagtctccagccaccctgtctttgtctccaggcgaaagagccaccctctcctgccgagcaagtgaaaatgtttacagctacttagcctggtaccaacagaaacctggccaggctcctaggctcctcatctattttgcaaaaaccttagcagaaggtattccagccaggttcagtggcagtggctccgggacagacttcactctcaccatcagcagcctagagcctgaagattttgcagtttattactgtcaacatcattccgataatccgtggacattcggccaagggaccaaggtggaaatcaaatga

SEQ ID NO: 415 - protein, 518 aa, Artificial sequence
  Synthetic polypeptide W0063 amino acid sequence - full length sequence
  MISC_FEATURE (1)..(20): Leader sequence
  MISC_FEATURE (21)..(23): Junction
  MISC_FEATURE (24)..(38): Hinge region (Linker)
  MISC_FEATURE (39)..(254): CH2CH3 region
  MISC_FEATURE (255)..(269): PIMS linker
  MISC_FEATURE (270)..(294): Heavy region
  MISC_FEATURE (295)..(302): Heavy chain CDR sub-domain
  MISC_FEATURE (303)..(327): Heavy region
  MISC_FEATURE (328)..(334): Heavy chain CDR sub-domain
  MISC_FEATURE (335)..(365): Heavy region
  MISC_FEATURE (366)..(374): Heavy chain CDR sub-domain
  MISC_FEATURE (375)..(385): Heavy region
  MISC_FEATURE (386)..(410): Hinge region (Linker)
  MISC_FEATURE (411)..(436): Light region
  MISC_FEATURE (437)..(442): Light chain CDR sub-domain
  MISC_FEATURE (443)..(462): Light region
  MISC_FEATURE (463)..(475): Light chain CDR sub-domain
  MISC_FEATURE (476)..(498): Light region
  MISC_FEATURE (499)..(507): Light chain CDR sub-domain
  MISC_FEATURE (508)..(517): Light region
  MISC_FEATURE (518)..(518): Xaa is a stop codon
MEAPAQLLFLLLLWLPDTTGSSSEPKSSDKTHTCPPCPAPELLGGPSVFLFPPKPKDTLMISRTPEVTCVVVDVSHEDPEVKFNWYVDGVEVHNAKTKPREEQYNSTYRVVSVLTVLHQDWLNGKEYKCKVSNKALPAPIEKTISKAKGQPREPQVYTLPPSRDELTKNQVSLTCLVKGFYPSDIAVEWESNGQPENNYKTTPPVLDSDGSFFLYSKLTVDKSRWQQGNVFSCSVMHEALHNHYTQKSLSLSPGLSVKADFLTPSIGNSEVQLVQSGAEVKKPGESLKISCKGSGYSFTGYNMNWVRQMPGKGLEWMGNIDPYYGGTTYNRKFKGQVTISADKSISTAYLQWSSLKASDTAMYYCARSVGPFDSWGQGTLVTVSSGGGGSGGGGSGGGGSGGGGSGGGGSEIVLTQSPATLSLSPGERATLSCRASENVYSYLAWYQQKPGQAPRLLIYFAKTLAEGIPARFSGSGSGTDFTLTISSLEPEDFAVYYCQHHSDNPWTFGQGTKVEIKX

SEQ ID NO: 416 - DNA, 1545 bp, Artificial sequence
  Synthetic polynucleotide W0064 nucleotide sequence - full length sequence
atggaagcaccagcgcagcttctcttcctcctgctactctggctcccagataccaccggttcctcgagcgagcccaaatcttctgacaaaactcacacatgcccaccgtgcccagcacctgaactcctgggtggaccgtcagtcttcctcttccccccaaaacccaaggacaccctcatgatctcccggacccctgaggtcacatgcgtggtggtggacgtgagccacgaagaccctgaggtcaagttcaactggtacgtggacggcgtggaggtgcataatgccaagacaaagccgcgggaggagcagtacaacagcacgtaccgtgtggtcagcgtcctcaccgtcctgcaccaggactggctgaatggcaaggagtacaagtgcaaggtctccaacaaagccctcccagcccccatcgagaaaaccatctccaaagccaaagggcagccccgagaaccacaggtgtacaccctgcccccatcccgggatgagctgaccaagaaccaggtcagcctgacctgcctggtcaaaggcttctatccaagcgacatcgccgtggagtgggagagcaatgggcagccggagaacaactacaagaccacgcctcccgtgctggactccgacggctccttcttcctctacagcaagctcaccgtggacaagagcaggtggcagcaggggaacgtcttctcatgctccgtgatgcatgaggctctgcacaaccactacacgcagaagagcctctccctgtctccgggtcagatgaactccgagttgagcgtgctcgcgaattctgaggtgcagctggtgcagtctggagcagaggtgaaaaagcccggagagtctctgaagatttcctgtaagggctccggttactcattcactggctacaatatgaactgggtgcgccagatgcccgggaaaggccttgagtggatgggcaatattgatccttattatggtggtactacctacaaccggaagttcaagggccaggtcactatctccgccgacaagtccatcagcaccgcctacctgcaatggagcagcctgaaggcctcggacaccgccatgtattactgtgcacgctcagtcggccctttcgactcctggggccagggcaccctggtcactgtctcctctgggggtggaggctctggtggcggtggctctggcggaggtggatccggtggcggcggatctggcgggggtggctctgaaattgtgttgacacagtctccagccaccctgtctttgtctccaggcgaaagagccaccctctcctgccgagcaagtgaaaatgtttacagctacttagcctggtaccaacagaaacctggccaggctcctaggctcctcatctattttgcaaaaaccttagcagaaggtattccagccaggttcagtggcagtggctccgggacagacttcactctcaccatcagcagcctagagcctgaagattttgcagtttattactgtcaacatcattccgataatccgtggacattcggccaagggaccaaggtggaaatcaaatga

SEQ ID NO: 417 - protein, 515 aa, Artificial sequence
  Synthetic polypeptide W0064 amino acid sequence - full length sequence
  MISC_FEATURE (1)..(20): Leader sequence
  MISC_FEATURE (21)..(23): Junction
  MISC_FEATURE (24)..(38): Hinge region (Linker)
  MISC_FEATURE (39)..(254): CH2CH3 region
  MISC_FEATURE (255)..(266): PIMS linker
  MISC_FEATURE (267)..(291): Heavy region
  MISC_FEATURE (292)..(299): Heavy chain CDR sub-domain
  MISC_FEATURE (300)..(324): Heavy region
  MISC_FEATURE (325)..(331): Heavy chain CDR sub-domain
  MISC_FEATURE (332)..(362): Heavy region
  MISC_FEATURE (363)..(371): Heavy chain CDR sub-domain
  MISC_FEATURE (372)..(382): Heavy region
  MISC_FEATURE (383)..(407): Hinge region (Linker)
  MISC_FEATURE (408)..(433): Light region
  MISC_FEATURE (434)..(439): Light chain CDR sub-domain
  MISC_FEATURE (440)..(459): Light region
  MISC_FEATURE (460)..(472): Light chain CDR sub-domain
  MISC_FEATURE (473)..(495): Light region
  MISC_FEATURE (496)..(504): Light chain CDR sub-domain
  MISC_FEATURE (505)..(514): Light region
  MISC_FEATURE (515)..(515): Xaa is a stop codon
MEAPAQLLFLLLLWLPDTTGSSSEPKSSDKTHTCPPCPAPELLGGPSVFLFPPKPKDTLMISRTPEVTCVVVDVSHEDPEVKFNWYVDGVEVHNAKTKPREEQYNSTYRVVSVLTVLHQDWLNGKEYKCKVSNKALPAPIEKTISKAKGQPREPQVYTLPPSRDELTKNQVSLTCLVKGFYPSDIAVEWESNGQPENNYKTTPPVLDSDGSFFLYSKLTVDKSRWQQGNVFSCSVMHEALHNHYTQKSLSLSPGQMNSELSVLANSEVQLVQSGAEVKKPGESLKISCKGSGYSFTGYNMNWVRQMPGKGLEWMGNIDPYYGGTTYNRKFKGQVTISADKSISTAYLQWSSLKASDTAMYYCARSVGPFDSWGQGTLVTVSSGGGGSGGGGSGGGGSGGGGSGGGGSEIVLTQSPATLSLSPGERATLSCRASENVYSYLAWYQQKPGQAPRLLIYFAKTLAEGIPARFSGSGSGTDFTLTISSLEPEDFAVYYCQHHSDNPWTFGQGTKVEIKX

SEQ ID NO: 418 - DNA, 1572 bp, Artificial sequence
  Synthetic polynucleotide W0065 nucleotide sequence - full length sequence
atggaagcaccagcgcagcttctcttcctcctgctactctggctcccagataccaccggttcctcgagcgagcccaaatcttctgacaaaactcacacatgcccaccgtgcccagcacctgaactcctgggtggaccgtcagtcttcctcttccccccaaaacccaaggacaccctcatgatctcccggacccctgaggtcacatgcgtggtggtggacgtgagccacgaagaccctgaggtcaagttcaactggtacgtggacggcgtggaggtgcataatgccaagacaaagccgcgggaggagcagtacaacagcacgtaccgtgtggtcagcgtcctcaccgtcctgcaccaggactggctgaatggcaaggagtacaagtgcaaggtctccaacaaagccctcccagcccccatcgagaaaaccatctccaaagccaaagggcagccccgagaaccacaggtgtacaccctgcccccatcccgggatgagctgaccaagaaccaggtcagcctgacctgcctggtcaaaggcttctatccaagcgacatcgccgtggagtgggagagcaatgggcagccggagaacaactacaagaccacgcctcccgtgctggactccgacggctccttcttcctctacagcaagctcaccgtggacaagagcaggtggcagcaggggaacgtcttctcatgctccgtgatgcatgaggctctgcacaaccactacacgcagaagagcctctccctgtctccgggtcagaggcacaacaattcttccctgaatacaagaactcagaaagcacgtcattgtccgaattctgaggtgcagctggtgcagtctggagcagaggtgaaaaagcccggagagtctctgaagatttcctgtaagggctccggttactcattcactggctacaatatgaactgggtgcgccagatgcccgggaaaggccttgagtggatgggcaatattgatccttattatggtggtactacctacaaccggaagttcaagggccaggtcactatctccgccgacaagtccatcagcaccgcctacctgcaatggagcagcctgaaggcctcggacaccgccatgtattactgtgcacgctcagtcggccctttcgactcctggggccagggcaccctggtcactgtctcctctgggggtggaggctctggtggcggtggctctggcggaggtggatccggtggcggcggatctggcgggggtggctctgaaattgtgttgacacagtctccagccaccctgtctttgtctccaggcgaaagagccaccctctcctgccgagcaagtgaaaatgtttacagctacttagcctggtaccaacagaaacctggccaggctcctaggctcctcatctattttgcaaaaaccttagcagaaggtattccagccaggttcagtggcagtggctccgggacagacttcactctcaccatcagcagcctagagcctgaagattttgcagtttattactgtcaacatcattccgataatccgtggacattcggccaagggaccaaggtggaaatcaaatga

SEQ ID NO: 419 - protein, 524 aa, Artificial sequence
  Synthetic polypeptide W0065 amino acid sequence - full length sequence
  MISC_FEATURE (1)..(20): Leader sequence
  MISC_FEATURE (21)..(23): Junction
  MISC_FEATURE (24)..(38): Hinge region (Linker)
  MISC_FEATURE (39)..(254): CH2CH3 region
  MISC_FEATURE (255)..(275): PIMS linker
  MISC_FEATURE (276)..(300): Heavy region
  MISC_FEATURE (301)..(308): Heavy chain CDR sub-domain
  MISC_FEATURE (309)..(333): Heavy region
  MISC_FEATURE (334)..(340): Heavy chain CDR sub-domain
  MISC_FEATURE (341)..(371): Heavy region
  MISC_FEATURE (372)..(380): Heavy chain CDR sub-domain
  MISC_FEATURE (381)..(391): Heavy region
  MISC_FEATURE (392)..(416): Hinge region (Linker)
  MISC_FEATURE (417)..(442): Light region
  MISC_FEATURE (443)..(448): Light chain CDR sub-domain
  MISC_FEATURE (449)..(468): Light region
  MISC_FEATURE (469)..(481): Light chain CDR sub-domain
  MISC_FEATURE (482)..(504): Light region
  MISC_FEATURE (505)..(513): Light chain CDR sub-domain
  MISC_FEATURE (514)..(523): Light region
  MISC_FEATURE (524)..(524): Xaa is a stop codon
MEAPAQLLFLLLLWLPDTTGSSSEPKSSDKTHTCPPCPAPELLGGPSVFLFPPKPKDTLMISRTPEVTCVVVDVSHEDPEVKFNWYVDGVEVHNAKTKPREEQYNSTYRVVSVLTVLHQDWLNGKEYKCKVSNKALPAPIEKTISKAKGQPREPQVYTLPPSRDELTKNQVSLTCLVKGFYPSDIAVEWESNGQPENNYKTTPPVLDSDGSFFLYSKLTVDKSRWQQGNVFSCSVMHEALHNHYTQKSLSLSPGQRHNNSSLNTRTQKARHCPNSEVQLVQSGAEVKKPGESLKISCKGSGYSFTGYNMNWVRQMPGKGLEWMGNIDPYYGGTTYNRKFKGQVTISADKSISTAYLQWSSLKASDTAMYYCARSVGPFDSWGQGTLVTVSSGGGGSGGGGSGGGGSGGGGSGGGGSEIVLTQSPATLSLSPGERATLSCRASENVYSYLAWYQQKPGQAPRLLIYFAKTLAEGIPARFSGSGSGTDFTLTISSLEPEDFAVYYCQHHSDNPWTFGQGTKVEIKX

SEQ ID NO: 420 - DNA, 1485 bp, Artificial sequence
  Synthetic polynucleotide W0066 nucleotide sequence - full length sequence
atggaagcaccagcgcagcttctcttcctcctgctactctggctcccagataccaccggttcctcgagcgagcccaaatcttctgacaaaactcacacatgcccaccgtgcccagcacctgaactcctgggtggaccgtcagtcttcctcttccccccaaaacccaaggacaccctcatgatctcccggacccctgaggtcacatgcgtggtggtggacgtgagccacgaagaccctgaggtcaagttcaactggtacgtggacggcgtggaggtgcataatgccaagacaaagccgcgggaggagcagtacaacagcacgtaccgtgtggtcagcgtcctcaccgtcctgcaccaggactggctgaatggcaaggagtacaagtgcaaggtctccaacaaagccctcccagcccccatcgagaaaaccatctccaaagccaaagggcagccccgagaaccacaggtgtacaccctgcccccatcccgggatgagctgaccaagaaccaggtcagcctgacctgcctggtcaaaggcttctatccaagcgacatcgccgtggagtgggagagcaatgggcagccggagaacaactacaagaccacgcctcccgtgctggactccgacggctccttcttcctctacagcaagctcaccgtggacaagagcaggtggcagcaggggaacgtcttctcatgctccgtgatgcatgaggctctgcacaaccactacacgcagaagagcctctccctgtctccgggttctccaccttctccgaattctgaggtgcagctggtgcagtctggagcagaggtgaaaaagcccggagagtctctgaagatttcctgtaagggctccggttactcattcactggctacaatatgaactgggtgcgccagatgcccgggaaaggccttgagtggatgggcaatattgatccttattatggtggtactacctacaaccggaagttcaagggccaggtcactatctccgccgacaagtccatcagcaccgcctacctgcaatggagcagcctgaaggcctcggacaccgccatgtattactgtgcacgctcagtcggccctttcgactcctggggccagggcaccctggtcactgtctcctctgggggtggaggctctggtggcggtggatccgaaattgtgttgacacagtctccagccaccctgtctttgtctccaggcgaaagagccaccctctcctgccgagcaagtgaaaatgtttacagctacttagcctggtaccaacagaaacctggccaggctcctaggctcctcatctattttgcaaaaaccttagcagaaggtattccagccaggttcagtggcagtggctccgggacagacttcactctcaccatcagcagcctagagcctgaagattttgcagtttattactgtcaacatcattccgataatccgtggacattcggccaagggaccaaggtggaaatcaaatga

SEQ ID NO: 421 - protein, 495 aa, Artificial sequence
  Synthetic polypeptide W0066 amino acid sequence - full length sequence
  MISC_FEATURE (1)..(20): Leader sequence
  MISC_FEATURE (21)..(23): Junction
  MISC_FEATURE (24)..(38): Hinge region (Linker)
  MISC_FEATURE (39)..(254): CH2CH3 region
  MISC_FEATURE (255)..(261): PIMS linker
  MISC_FEATURE (262)..(286): Heavy region
  MISC_FEATURE (287)..(294): Heavy chain CDR sub-domain
  MISC_FEATURE (295)..(319): Heavy region
  MISC_FEATURE (320)..(326): Heavy chain CDR sub-domain
  MISC_FEATURE (327)..(357): Heavy region
  MISC_FEATURE (358)..(366): Heavy chain CDR sub-domain
  MISC_FEATURE (367)..(377): Heavy region
  MISC_FEATURE (378)..(387): Hinge region (Linker)
  MISC_FEATURE (388)..(413): Light region
  MISC_FEATURE (414)..(419): Light chain CDR sub-domain
  MISC_FEATURE (420)..(439): Light region
  MISC_FEATURE (440)..(452): Light chain CDR sub-domain
  MISC_FEATURE (453)..(475): Light region
  MISC_FEATURE (476)..(484): Light chain CDR sub-domain
  MISC_FEATURE (485)..(494): Light region
  MISC_FEATURE (495)..(495): Xaa is a stop codon
MEAPAQLLFLLLLWLPDTTGSSSEPKSSDKTHTCPPCPAPELLGGPSVFLFPPKPKDTLMISRTPEVTCVVVDVSHEDPEVKFNWYVDGVEVHNAKTKPREEQYNSTYRVVSVLTVLHQDWLNGKEYKCKVSNKALPAPIEKTISKAKGQPREPQVYTLPPSRDELTKNQVSLTCLVKGFYPSDIAVEWESNGQPENNYKTTPPVLDSDGSFFLYSKLTVDKSRWQQGNVFSCSVMHEALHNHYTQKSLSLSPGSPPSPNSEVQLVQSGAEVKKPGESLKISCKGSGYSFTGYNMNWVRQMPGKGLEWMGNIDPYYGGTTYNRKFKGQVTISADKSISTAYLQWSSLKASDTAMYYCARSVGPFDSWGQGTLVTVSSGGGGSGGGGSEIVLTQSPATLSLSPGERATLSCRASENVYSYLAWYQQKPGQAPRLLIYFAKTLAEGIPARFSGSGSGTDFTLTISSLEPEDFAVYYCQHHSDNPWTFGQGTKVEIKX

SEQ ID NO: 422 - DNA, 1509 bp, Artificial sequence
  Synthetic polynucleotide W0067 nucleotide sequence - full length sequence
atggaagcaccagcgcagcttctcttcctcctgctactctggctcccagataccaccggttcctcgagcgagcccaaatcttctgacaaaactcacacatgcccaccgtgcccagcacctgaactcctgggtggaccgtcagtcttcctcttccccccaaaacccaaggacaccctcatgatctcccggacccctgaggtcacatgcgtggtggtggacgtgagccacgaagaccctgaggtcaagttcaactggtacgtggacggcgtggaggtgcataatgccaagacaaagccgcgggaggagcagtacaacagcacgtaccgtgtggtcagcgtcctcaccgtcctgcaccaggactggctgaatggcaaggagtacaagtgcaaggtctccaacaaagccctcccagcccccatcgagaaaaccatctccaaagccaaagggcagccccgagaaccacaggtgtacaccctgcccccatcccgggatgagctgaccaagaaccaggtcagcctgacctgcctggtcaaaggcttctatccaagcgacatcgccgtggagtgggagagcaatgggcagccggagaacaactacaagaccacgcctcccgtgctggactccgacggctccttcttcctctacagcaagctcaccgtggacaagagcaggtggcagcaggggaacgtcttctcatgctccgtgatgcatgaggctctgcacaaccactacacgcagaagagcctctccctgtctccgggtctgtctgtgaaagctgacttcctcactccatccatcgggaattctgaggtgcagctggtgcagtctggagcagaggtgaaaaagcccggagagtctctgaagatttcctgtaagggctccggttactcattcactggctacaatatgaactgggtgcgccagatgcccgggaaaggccttgagtggatgggcaatattgatccttattatggtggtactacctacaaccggaagttcaagggccaggtcactatctccgccgacaagtccatcagcaccgcctacctgcaatggagcagcctgaaggcctcggacaccgccatgtattactgtgcacgctcagtcggccctttcgactcctggggccagggcaccctggtcactgtctcctctgggggtggaggctctggtggcggtggatccgaaattgtgttgacacagtctccagccaccctgtctttgtctccaggcgaaagagccaccctctcctgccgagcaagtgaaaatgtttacagctacttagcctggtaccaacagaaacctggccaggctcctaggctcctcatctattttgcaaaaaccttagcagaaggtattccagccaggttcagtggcagtggctccgggacagacttcactctcaccatcagcagcctagagcctgaagattttgcagtttattactgtcaacatcattccgataatccgtggacattcggccaagggaccaaggtggaaatcaaatga

SEQ ID NO: 423 - protein, 503 aa, Artificial sequence
  Synthetic polypeptide W0067 amino acid sequence - full length sequence
  MISC_FEATURE (1)..(20): Leader sequence
  MISC_FEATURE (21)..(23): Junction
  MISC_FEATURE (24)..(38): Hinge region (Linker)
  MISC_FEATURE (39)..(254): CH2CH3 region
  MISC_FEATURE (255)..(269): PIMS linker
  MISC_FEATURE (270)..(294): Heavy region
  MISC_FEATURE (295)..(302): Heavy chain CDR sub-domain
  MISC_FEATURE (303)..(327): Heavy region
  MISC_FEATURE (328)..(334): Heavy chain CDR sub-domain
  MISC_FEATURE (335)..(365): Heavy region
  MISC_FEATURE (366)..(374): Heavy chain CDR sub-domain
  MISC_FEATURE (375)..(385): Heavy region
  MISC_FEATURE (386)..(395): Hinge region (Linker)
  MISC_FEATURE (396)..(421): Light region
  MISC_FEATURE (422)..(427): Light chain CDR sub-domain
  MISC_FEATURE (428)..(447): Light region
  MISC_FEATURE (448)..(460): Light chain CDR sub-domain
  MISC_FEATURE (461)..(483): Light region
  MISC_FEATURE (484)..(492): Light chain CDR sub-domain
  MISC_FEATURE (493)..(502): Light region
  MISC_FEATURE (503)..(503): Xaa is a stop codon
MEAPAQLLFLLLLWLPDTTGSSSEPKSSDKTHTCPPCPAPELLGGPSVFLFPPKPKDTLMISRTPEVTCVVVDVSHEDPEVKFNWYVDGVEVHNAKTKPREEQYNSTYRVVSVLTVLHQDWLNGKEYKCKVSNKALPAPIEKTISKAKGQPREPQVYTLPPSRDELTKNQVSLTCLVKGFYPSDIAVEWESNGQPENNYKTTPPVLDSDGSFFLYSKLTVDKSRWQQGNVFSCSVMHEALHNHYTQKSLSLSPGLSVKADFLTPSIGNSEVQLVQSGAEVKKPGESLKISCKGSGYSFTGYNMNWVRQMPGKGLEWMGNIDPYYGGTTYNRKFKGQVTISADKSISTAYLQWSSLKASDTAMYYCARSVGPFDSWGQGTLVTVSSGGGGSGGGGSEIVLTQSPATLSLSPGERATLSCRASENVYSYLAWYQQKPGQAPRLLIYFAKTLAEGIPARFSGSGSGTDFTLTISSLEPEDFAVYYCQHHSDNPWTFGQGTKVEIKX

SEQ ID NO: 424 - DNA, 1500 bp, Artificial sequence
  Synthetic polynucleotide W0068 nucleotide sequence - full length sequence
atggaagcaccagcgcagcttctcttcctcctgctactctggctcccagataccaccggttcctcgagcgagcccaaatcttctgacaaaactcacacatgcccaccgtgcccagcacctgaactcctgggtggaccgtcagtcttcctcttccccccaaaacccaaggacaccctcatgatctcccggacccctgaggtcacatgcgtggtggtggacgtgagccacgaagaccctgaggtcaagttcaactggtacgtggacggcgtggaggtgcataatgccaagacaaagccgcgggaggagcagtacaacagcacgtaccgtgtggtcagcgtcctcaccgtcctgcaccaggactggctgaatggcaaggagtacaagtgcaaggtctccaacaaagccctcccagcccccatcgagaaaaccatctccaaagccaaagggcagccccgagaaccacaggtgtacaccctgcccccatcccgggatgagctgaccaagaaccaggtcagcctgacctgcctggtcaaaggcttctatccaagcgacatcgccgtggagtgggagagcaatgggcagccggagaacaactacaagaccacgcctcccgtgctggactccgacggctccttcttcctctacagcaagctcaccgtggacaagagcaggtggcagcaggggaacgtcttctcatgctccgtgatgcatgaggctctgcacaaccactacacgcagaagagcctctccctgtctccgggtcagatgaactccgagttgagcgtgctcgcgaattctgaggtgcagctggtgcagtctggagcagaggtgaaaaagcccggagagtctctgaagatttcctgtaagggctccggttactcattcactggctacaatatgaactgggtgcgccagatgcccgggaaaggccttgagtggatgggcaatattgatccttattatggtggtactacctacaaccggaagttcaagggccaggtcactatctccgccgacaagtccatcagcaccgcctacctgcaatggagcagcctgaaggcctcggacaccgccatgtattactgtgcacgctcagtcggccctttcgactcctggggccagggcaccctggtcactgtctcctctgggggtggaggctctggtggcggtggatccgaaattgtgttgacacagtctccagccaccctgtctttgtctccaggcgaaagagccaccctctcctgccgagcaagtgaaaatgtttacagctacttagcctggtaccaacagaaacctggccaggctcctaggctcctcatctattttgcaaaaaccttagcagaaggtattccagccaggttcagtggcagtggctccgggacagacttcactctcaccatcagcagcctagagcctgaagattttgcagtttattactgtcaacatcattccgataatccgtggacattcggccaagggaccaaggtggaaatcaaatga

SEQ ID NO: 425 - protein, 500 aa, Artificial sequence
  Synthetic polypeptide W0068 amino acid sequence - full length sequence
  MISC_FEATURE (1)..(20): Leader sequence
  MISC_FEATURE (21)..(23): Junction
  MISC_FEATURE (24)..(38): Hinge region (Linker)
  MISC_FEATURE (39)..(254): CH2CH3 region
  MISC_FEATURE (255)..(266): PIMS linker
  MISC_FEATURE (267)..(291): Heavy region
  MISC_FEATURE (292)..(299): Heavy chain CDR sub-domain
  MISC_FEATURE (300)..(324): Heavy region
  MISC_FEATURE (325)..(331): Heavy chain CDR sub-domain
  MISC_FEATURE (332)..(362): Heavy region
  MISC_FEATURE (363)..(371): Heavy chain CDR sub-domain
  MISC_FEATURE (372)..(382): Heavy  region
  MISC_FEATURE (383)..(392): Hinge region (Linker)
  MISC_FEATURE (393)..(418): Light region
  MISC_FEATURE (419)..(424): Light chain CDR sub-domain
  MISC_FEATURE (425)..(444): Light region
  MISC_FEATURE (445)..(457): Light chain CDR sub-domain
  MISC_FEATURE (458)..(480): Light region
  MISC_FEATURE (481)..(489): Light chain CDR sub-domain
  MISC_FEATURE (490)..(499): Light region
  MISC_FEATURE (500)..(500): Xaa is a stop codon
MEAPAQLLFLLLLWLPDTTGSSSEPKSSDKTHTCPPCPAPELLGGPSVFLFPPKPKDTLMISRTPEVTCVVVDVSHEDPEVKFNWYVDGVEVHNAKTKPREEQYNSTYRVVSVLTVLHQDWLNGKEYKCKVSNKALPAPIEKTISKAKGQPREPQVYTLPPSRDELTKNQVSLTCLVKGFYPSDIAVEWESNGQPENNYKTTPPVLDSDGSFFLYSKLTVDKSRWQQGNVFSCSVMHEALHNHYTQKSLSLSPGQMNSELSVLANSEVQLVQSGAEVKKPGESLKISCKGSGYSFTGYNMNWVRQMPGKGLEWMGNIDPYYGGTTYNRKFKGQVTISADKSISTAYLQWSSLKASDTAMYYCARSVGPFDSWGQGTLVTVSSGGGGSGGGGSEIVLTQSPATLSLSPGERATLSCRASENVYSYLAWYQQKPGQAPRLLIYFAKTLAEGIPARFSGSGSGTDFTLTISSLEPEDFAVYYCQHHSDNPWTFGQGTKVEIKX

SEQ ID NO: 426 - DNA, 1527 bp, Artificial sequence
  Synthetic polynucleotide W0069 nucleotide sequence - full length sequence
atggaagcaccagcgcagcttctcttcctcctgctactctggctcccagataccaccggttcctcgagcgagcccaaatcttctgacaaaactcacacatgcccaccgtgcccagcacctgaactcctgggtggaccgtcagtcttcctcttccccccaaaacccaaggacaccctcatgatctcccggacccctgaggtcacatgcgtggtggtggacgtgagccacgaagaccctgaggtcaagttcaactggtacgtggacggcgtggaggtgcataatgccaagacaaagccgcgggaggagcagtacaacagcacgtaccgtgtggtcagcgtcctcaccgtcctgcaccaggactggctgaatggcaaggagtacaagtgcaaggtctccaacaaagccctcccagcccccatcgagaaaaccatctccaaagccaaagggcagccccgagaaccacaggtgtacaccctgcccccatcccgggatgagctgaccaagaaccaggtcagcctgacctgcctggtcaaaggcttctatccaagcgacatcgccgtggagtgggagagcaatgggcagccggagaacaactacaagaccacgcctcccgtgctggactccgacggctccttcttcctctacagcaagctcaccgtggacaagagcaggtggcagcaggggaacgtcttctcatgctccgtgatgcatgaggctctgcacaaccactacacgcagaagagcctctccctgtctccgggtcagaggcacaacaattcttccctgaatacaagaactcagaaagcacgtcattgtccgaattctgaggtgcagctggtgcagtctggagcagaggtgaaaaagcccggagagtctctgaagatttcctgtaagggctccggttactcattcactggctacaatatgaactgggtgcgccagatgcccgggaaaggccttgagtggatgggcaatattgatccttattatggtggtactacctacaaccggaagttcaagggccaggtcactatctccgccgacaagtccatcagcaccgcctacctgcaatggagcagcctgaaggcctcggacaccgccatgtattactgtgcacgctcagtcggccctttcgactcctggggccagggcaccctggtcactgtctcctctgggggtggaggctctggtggcggtggatccgaaattgtgttgacacagtctccagccaccctgtctttgtctccaggcgaaagagccaccctctcctgccgagcaagtgaaaatgtttacagctacttagcctggtaccaacagaaacctggccaggctcctaggctcctcatctattttgcaaaaaccttagcagaaggtattccagccaggttcagtggcagtggctccgggacagacttcactctcaccatcagcagcctagagcctgaagattttgcagtttattactgtcaacatcattccgataatccgtggacattcggccaagggaccaaggtggaaatcaaatga

SEQ ID NO: 427 - protein, 509 aa, Artificial sequence
  Synthetic polypeptide W0069 amino acid sequence - full length sequence
  MISC_FEATURE (1)..(20): Leader sequence
  MISC_FEATURE (21)..(23): Junction
  MISC_FEATURE (24)..(38): Hinge region (Linker)
  MISC_FEATURE (39)..(254): CH2CH3 region
  MISC_FEATURE (255)..(275): PIMS linker
  MISC_FEATURE (276)..(300): Heavy region
  MISC_FEATURE (301)..(308): Heavy chain CDR sub-domain
  MISC_FEATURE (309)..(333): Heavy region
  MISC_FEATURE (334)..(340): Heavy chain CDR sub-domain
  MISC_FEATURE (341)..(371): Heavy region
  MISC_FEATURE (372)..(380): Heavy chain CDR sub-domain
  MISC_FEATURE (381)..(391): Heavy region
  MISC_FEATURE (392)..(401): Hinge region (Linker)
  MISC_FEATURE (402)..(427): Light region
  MISC_FEATURE (428)..(433): Light chain CDR sub-domain
  MISC_FEATURE (434)..(453): Light region
  MISC_FEATURE (454)..(466): Light chain CDR sub-domain
  MISC_FEATURE (467)..(489): Light region
  MISC_FEATURE (490)..(498): Light chain CDR sub-domain
  MISC_FEATURE (499)..(508): Light region
  MISC_FEATURE (509)..(509): Xaa is a stop codon
MEAPAQLLFLLLLWLPDTTGSSSEPKSSDKTHTCPPCPAPELLGGPSVFLFPPKPKDTLMISRTPEVTCVVVDVSHEDPEVKFNWYVDGVEVHNAKTKPREEQYNSTYRVVSVLTVLHQDWLNGKEYKCKVSNKALPAPIEKTISKAKGQPREPQVYTLPPSRDELTKNQVSLTCLVKGFYPSDIAVEWESNGQPENNYKTTPPVLDSDGSFFLYSKLTVDKSRWQQGNVFSCSVMHEALHNHYTQKSLSLSPGQRHNNSSLNTRTQKARHCPNSEVQLVQSGAEVKKPGESLKISCKGSGYSFTGYNMNWVRQMPGKGLEWMGNIDPYYGGTTYNRKFKGQVTISADKSISTAYLQWSSLKASDTAMYYCARSVGPFDSWGQGTLVTVSSGGGGSGGGGSEIVLTQSPATLSLSPGERATLSCRASENVYSYLAWYQQKPGQAPRLLIYFAKTLAEGIPARFSGSGSGTDFTLTISSLEPEDFAVYYCQHHSDNPWTFGQGTKVEIKX

SEQ ID NO: 428 - DNA, 1500 bp, Artificial sequence
  Synthetic polynucleotide W0070 nucleotide sequence - full length sequence
atggaagcaccagcgcagcttctcttcctcctgctactctggctcccagataccaccggttcctcgagcgagcccaaatcttctgacaaaactcacacatgcccaccgtgcccagcacctgaactcctgggtggaccgtcagtcttcctcttccccccaaaacccaaggacaccctcatgatctcccggacccctgaggtcacatgcgtggtggtggacgtgagccacgaagaccctgaggtcaagttcaactggtacgtggacggcgtggaggtgcataatgccaagacaaagccgcgggaggagcagtacaacagcacgtaccgtgtggtcagcgtcctcaccgtcctgcaccaggactggctgaatggcaaggagtacaagtgcaaggtctccaacaaagccctcccagcccccatcgagaaaaccatctccaaagccaaagggcagccccgagaaccacaggtgtacaccctgcccccatcccgggatgagctgaccaagaaccaggtcagcctgacctgcctggtcaaaggcttctatccaagcgacatcgccgtggagtgggagagcaatgggcagccggagaacaactacaagaccacgcctcccgtgctggactccgacggctccttcttcctctacagcaagctcaccgtggacaagagcaggtggcagcaggggaacgtcttctcatgctccgtgatgcatgaggctctgcacaaccactacacgcagaagagcctctccctgtctccgggttctccaccttctccgaattctgaggtgcagctggtgcagtctggagcagaggtgaaaaagcccggagagtctctgaagatttcctgtaagggctccggttactcattcactggctacaatatgaactgggtgcgccagatgcccgggaaaggccttgagtggatgggcaatattgatccttattatggtggtactacctacaaccggaagttcaagggccaggtcactatctccgccgacaagtccatcagcaccgcctacctgcaatggagcagcctgaaggcctcggacaccgccatgtattactgtgcacgctcagtcggccctttcgactcctggggccagggcaccctggtcactgtctcctctgggggtggaggctctggtggcggtggctctggcggaggtggatccgaaattgtgttgacacagtctccagccaccctgtctttgtctccaggcgaaagagccaccctctcctgccgagcaagtgaaaatgtttacagctacttagcctggtaccaacagaaacctggccaggctcctaggctcctcatctattttgcaaaaaccttagcagaaggtattccagccaggttcagtggcagtggctccgggacagacttcactctcaccatcagcagcctagagcctgaagattttgcagtttattactgtcaacatcattccgataatccgtggacattcggccaagggaccaaggtggaaatcaaatga

SEQ ID NO: 429 - protein, 500 aa, Artificial sequence
  Synthetic polypeptide W0070 amino acid sequence - full length sequence
  MISC_FEATURE (1)..(20): Leader sequence
  MISC_FEATURE (21)..(23): Junction
  MISC_FEATURE (24)..(38): Hinge region (Linker)
  MISC_FEATURE (39)..(254): CH2CH3 region
  MISC_FEATURE (255)..(261): PIMS linker
  MISC_FEATURE (262)..(286): Heavy region
  MISC_FEATURE (287)..(294): Heavy chain CDR sub-domain
  MISC_FEATURE (295)..(319): Heavy region
  MISC_FEATURE (320)..(326): Heavy chain CDR sub-domain
  MISC_FEATURE (327)..(357): Heavy region
  MISC_FEATURE (358)..(366): Heavy chain CDR sub-domain
  MISC_FEATURE (367)..(377): Heavy region
  MISC_FEATURE (378)..(392): Hinge region (Linker)
  MISC_FEATURE (393)..(418): Light region
  MISC_FEATURE (419)..(424): Light chain CDR sub-domain
  MISC_FEATURE (425)..(444): Light region
  MISC_FEATURE (445)..(457): Light chain CDR sub-domain
  MISC_FEATURE (458)..(480): Light region
  MISC_FEATURE (481)..(489): Light chain CDR sub-domain
  MISC_FEATURE (490)..(499): Light region
  MISC_FEATURE (500)..(500): Xaa is a stop codon
MEAPAQLLFLLLLWLPDTTGSSSEPKSSDKTHTCPPCPAPELLGGPSVFLFPPKPKDTLMISRTPEVTCVVVDVSHEDPEVKFNWYVDGVEVHNAKTKPREEQYNSTYRVVSVLTVLHQDWLNGKEYKCKVSNKALPAPIEKTISKAKGQPREPQVYTLPPSRDELTKNQVSLTCLVKGFYPSDIAVEWESNGQPENNYKTTPPVLDSDGSFFLYSKLTVDKSRWQQGNVFSCSVMHEALHNHYTQKSLSLSPGSPPSPNSEVQLVQSGAEVKKPGESLKISCKGSGYSFTGYNMNWVRQMPGKGLEWMGNIDPYYGGTTYNRKFKGQVTISADKSISTAYLQWSSLKASDTAMYYCARSVGPFDSWGQGTLVTVSSGGGGSGGGGSGGGGSEIVLTQSPATLSLSPGERATLSCRASENVYSYLAWYQQKPGQAPRLLIYFAKTLAEGIPARFSGSGSGTDFTLTISSLEPEDFAVYYCQHHSDNPWTFGQGTKVEIKX

SEQ ID NO: 430 - DNA, 1524 bp, Artificial sequence
  Synthetic polynucleotide W0071 nucleotide sequence - full length sequence
atggaagcaccagcgcagcttctcttcctcctgctactctggctcccagataccaccggttcctcgagcgagcccaaatcttctgacaaaactcacacatgcccaccgtgcccagcacctgaactcctgggtggaccgtcagtcttcctcttccccccaaaacccaaggacaccctcatgatctcccggacccctgaggtcacatgcgtggtggtggacgtgagccacgaagaccctgaggtcaagttcaactggtacgtggacggcgtggaggtgcataatgccaagacaaagccgcgggaggagcagtacaacagcacgtaccgtgtggtcagcgtcctcaccgtcctgcaccaggactggctgaatggcaaggagtacaagtgcaaggtctccaacaaagccctcccagcccccatcgagaaaaccatctccaaagccaaagggcagccccgagaaccacaggtgtacaccctgcccccatcccgggatgagctgaccaagaaccaggtcagcctgacctgcctggtcaaaggcttctatccaagcgacatcgccgtggagtgggagagcaatgggcagccggagaacaactacaagaccacgcctcccgtgctggactccgacggctccttcttcctctacagcaagctcaccgtggacaagagcaggtggcagcaggggaacgtcttctcatgctccgtgatgcatgaggctctgcacaaccactacacgcagaagagcctctccctgtctccgggtctgtctgtgaaagctgacttcctcactccatccatcgggaattctgaggtgcagctggtgcagtctggagcagaggtgaaaaagcccggagagtctctgaagatttcctgtaagggctccggttactcattcactggctacaatatgaactgggtgcgccagatgcccgggaaaggccttgagtggatgggcaatattgatccttattatggtggtactacctacaaccggaagttcaagggccaggtcactatctccgccgacaagtccatcagcaccgcctacctgcaatggagcagcctgaaggcctcggacaccgccatgtattactgtgcacgctcagtcggccctttcgactcctggggccagggcaccctggtcactgtctcctctgggggtggaggctctggtggcggtggctctggcggaggtggatccgaaattgtgttgacacagtctccagccaccctgtctttgtctccaggcgaaagagccaccctctcctgccgagcaagtgaaaatgtttacagctacttagcctggtaccaacagaaacctggccaggctcctaggctcctcatctattttgcaaaaaccttagcagaaggtattccagccaggttcagtggcagtggctccgggacagacttcactctcaccatcagcagcctagagcctgaagattttgcagtttattactgtcaacatcattccgataatccgtggacattcggccaagggaccaaggtggaaatcaaatga

SEQ ID NO: 431 - protein, 508 aa, Artificial sequence
  Synthetic polypeptide W0071 amino acid sequence - full length sequence
  MISC_FEATURE (1)..(20): Leader sequence
  MISC_FEATURE (21)..(23): Junction
  MISC_FEATURE (24)..(38): Hinge region (Linker)
  MISC_FEATURE (39)..(254): CH2CH3 region
  MISC_FEATURE (255)..(269): PIMS linker
  MISC_FEATURE (270)..(294): Heavy region
  MISC_FEATURE (295)..(302): Heavy chain CDR sub-domain
  MISC_FEATURE (303)..(327): Heavy region
  MISC_FEATURE (328)..(334): Heavy chain CDR sub-domain
  MISC_FEATURE (335)..(365): Heavy region
  MISC_FEATURE (366)..(374): Heavy chain CDR sub-domain
  MISC_FEATURE (375)..(385): Heavy region
  MISC_FEATURE (386)..(400): Hinge region (Linker)
  MISC_FEATURE (401)..(426): Light region
  MISC_FEATURE (427)..(432): Light chain CDR sub-domain
  MISC_FEATURE (433)..(452): Light region
  MISC_FEATURE (453)..(465): Light chain CDR sub-domain
  MISC_FEATURE (466)..(488): Light region
  MISC_FEATURE (489)..(497): Light chain CDR sub-domain
  MISC_FEATURE (498)..(507): Light region
  MISC_FEATURE (508)..(508): Xaa is a stop codon
MEAPAQLLFLLLLWLPDTTGSSSEPKSSDKTHTCPPCPAPELLGGPSVFLFPPKPKDTLMISRTPEVTCVVVDVSHEDPEVKFNWYVDGVEVHNAKTKPREEQYNSTYRVVSVLTVLHQDWLNGKEYKCKVSNKALPAPIEKTISKAKGQPREPQVYTLPPSRDELTKNQVSLTCLVKGFYPSDIAVEWESNGQPENNYKTTPPVLDSDGSFFLYSKLTVDKSRWQQGNVFSCSVMHEALHNHYTQKSLSLSPGLSVKADFLTPSIGNSEVQLVQSGAEVKKPGESLKISCKGSGYSFTGYNMNWVRQMPGKGLEWMGNIDPYYGGTTYNRKFKGQVTISADKSISTAYLQWSSLKASDTAMYYCARSVGPFDSWGQGTLVTVSSGGGGSGGGGSGGGGSEIVLTQSPATLSLSPGERATLSCRASENVYSYLAWYQQKPGQAPRLLIYFAKTLAEGIPARFSGSGSGTDFTLTISSLEPEDFAVYYCQHHSDNPWTFGQGTKVEIKX

SEQ ID NO: 432 - DNA, 1515 bp, Artificial sequence
  Synthetic polynucleotide W0072 nucleotide sequence - full length sequence
atggaagcaccagcgcagcttctcttcctcctgctactctggctcccagataccaccggttcctcgagcgagcccaaatcttctgacaaaactcacacatgcccaccgtgcccagcacctgaactcctgggtggaccgtcagtcttcctcttccccccaaaacccaaggacaccctcatgatctcccggacccctgaggtcacatgcgtggtggtggacgtgagccacgaagaccctgaggtcaagttcaactggtacgtggacggcgtggaggtgcataatgccaagacaaagccgcgggaggagcagtacaacagcacgtaccgtgtggtcagcgtcctcaccgtcctgcaccaggactggctgaatggcaaggagtacaagtgcaaggtctccaacaaagccctcccagcccccatcgagaaaaccatctccaaagccaaagggcagccccgagaaccacaggtgtacaccctgcccccatcccgggatgagctgaccaagaaccaggtcagcctgacctgcctggtcaaaggcttctatccaagcgacatcgccgtggagtgggagagcaatgggcagccggagaacaactacaagaccacgcctcccgtgctggactccgacggctccttcttcctctacagcaagctcaccgtggacaagagcaggtggcagcaggggaacgtcttctcatgctccgtgatgcatgaggctctgcacaaccactacacgcagaagagcctctccctgtctccgggtcagatgaactccgagttgagcgtgctcgcgaattctgaggtgcagctggtgcagtctggagcagaggtgaaaaagcccggagagtctctgaagatttcctgtaagggctccggttactcattcactggctacaatatgaactgggtgcgccagatgcccgggaaaggccttgagtggatgggcaatattgatccttattatggtggtactacctacaaccggaagttcaagggccaggtcactatctccgccgacaagtccatcagcaccgcctacctgcaatggagcagcctgaaggcctcggacaccgccatgtattactgtgcacgctcagtcggccctttcgactcctggggccagggcaccctggtcactgtctcctctgggggtggaggctctggtggcggtggctctggcggaggtggatccgaaattgtgttgacacagtctccagccaccctgtctttgtctccaggcgaaagagccaccctctcctgccgagcaagtgaaaatgtttacagctacttagcctggtaccaacagaaacctggccaggctcctaggctcctcatctattttgcaaaaaccttagcagaaggtattccagccaggttcagtggcagtggctccgggacagacttcactctcaccatcagcagcctagagcctgaagattttgcagtttattactgtcaacatcattccgataatccgtggacattcggccaagggaccaaggtggaaatcaaatga

SEQ ID NO: 433 - protein, 505 aa, Artificial sequence
  Synthetic polypeptide W0072 amino acid sequence - full length sequence
  MISC_FEATURE (1)..(20): Leader sequence
  MISC_FEATURE (21)..(23): Junction
  MISC_FEATURE (24)..(38): Hinge region (Linker)
  MISC_FEATURE (39)..(254): CH2CH3 region
  MISC_FEATURE (255)..(266): PIMS linker
  MISC_FEATURE (267)..(291): Heavy region
  MISC_FEATURE (292)..(299): Heavy chain CDR sub-domain
  MISC_FEATURE (300)..(324): Heavy region
  MISC_FEATURE (325)..(331): Heavy chain CDR sub-domain
  MISC_FEATURE (332)..(362): Heavy region
  MISC_FEATURE (363)..(371): Heavy chain CDR sub-domain
  MISC_FEATURE (372)..(382): Heavy region
  MISC_FEATURE (383)..(397): Hinge region (Linker)
  MISC_FEATURE (398)..(423): Light region
  MISC_FEATURE (424)..(429): Light chain CDR sub-domain
  MISC_FEATURE (430)..(449): Light region
  MISC_FEATURE (450)..(462): Light chain CDR sub-domain
  MISC_FEATURE (463)..(485): Light region
  MISC_FEATURE (486)..(494): Light chain CDR sub-domain
  MISC_FEATURE (495)..(504): Light region
  MISC_FEATURE (505)..(505): Xaa is a stop codon
MEAPAQLLFLLLLWLPDTTGSSSEPKSSDKTHTCPPCPAPELLGGPSVFLFPPKPKDTLMISRTPEVTCVVVDVSHEDPEVKFNWYVDGVEVHNAKTKPREEQYNSTYRVVSVLTVLHQDWLNGKEYKCKVSNKALPAPIEKTISKAKGQPREPQVYTLPPSRDELTKNQVSLTCLVKGFYPSDIAVEWESNGQPENNYKTTPPVLDSDGSFFLYSKLTVDKSRWQQGNVFSCSVMHEALHNHYTQKSLSLSPGQMNSELSVLANSEVQLVQSGAEVKKPGESLKISCKGSGYSFTGYNMNWVRQMPGKGLEWMGNIDPYYGGTTYNRKFKGQVTISADKSISTAYLQWSSLKASDTAMYYCARSVGPFDSWGQGTLVTVSSGGGGSGGGGSGGGGSEIVLTQSPATLSLSPGERATLSCRASENVYSYLAWYQQKPGQAPRLLIYFAKTLAEGIPARFSGSGSGTDFTLTISSLEPEDFAVYYCQHHSDNPWTFGQGTKVEIKX

SEQ ID NO: 434 - DNA, 1542 bp, Artificial sequence
  Synthetic polynucleotide W0073 nucleotide sequence - full length sequence
atggaagcaccagcgcagcttctcttcctcctgctactctggctcccagataccaccggttcctcgagcgagcccaaatcttctgacaaaactcacacatgcccaccgtgcccagcacctgaactcctgggtggaccgtcagtcttcctcttccccccaaaacccaaggacaccctcatgatctcccggacccctgaggtcacatgcgtggtggtggacgtgagccacgaagaccctgaggtcaagttcaactggtacgtggacggcgtggaggtgcataatgccaagacaaagccgcgggaggagcagtacaacagcacgtaccgtgtggtcagcgtcctcaccgtcctgcaccaggactggctgaatggcaaggagtacaagtgcaaggtctccaacaaagccctcccagcccccatcgagaaaaccatctccaaagccaaagggcagccccgagaaccacaggtgtacaccctgcccccatcccgggatgagctgaccaagaaccaggtcagcctgacctgcctggtcaaaggcttctatccaagcgacatcgccgtggagtgggagagcaatgggcagccggagaacaactacaagaccacgcctcccgtgctggactccgacggctccttcttcctctacagcaagctcaccgtggacaagagcaggtggcagcaggggaacgtcttctcatgctccgtgatgcatgaggctctgcacaaccactacacgcagaagagcctctccctgtctccgggtcagaggcacaacaattcttccctgaatacaagaactcagaaagcacgtcattgtccgaattctgaggtgcagctggtgcagtctggagcagaggtgaaaaagcccggagagtctctgaagatttcctgtaagggctccggttactcattcactggctacaatatgaactgggtgcgccagatgcccgggaaaggccttgagtggatgggcaatattgatccttattatggtggtactacctacaaccggaagttcaagggccaggtcactatctccgccgacaagtccatcagcaccgcctacctgcaatggagcagcctgaaggcctcggacaccgccatgtattactgtgcacgctcagtcggccctttcgactcctggggccagggcaccctggtcactgtctcctctgggggtggaggctctggtggcggtggctctggcggaggtggatccgaaattgtgttgacacagtctccagccaccctgtctttgtctccaggcgaaagagccaccctctcctgccgagcaagtgaaaatgtttacagctacttagcctggtaccaacagaaacctggccaggctcctaggctcctcatctattttgcaaaaaccttagcagaaggtattccagccaggttcagtggcagtggctccgggacagacttcactctcaccatcagcagcctagagcctgaagattttgcagtttattactgtcaacatcattccgataatccgtggacattcggccaagggaccaaggtggaaatcaaatga

SEQ ID NO: 435 - protein, 514 aa, Artificial sequence
  Synthetic polypeptide W0073 amino acid sequence - full length sequence
  MISC_FEATURE (1)..(20): Leader sequence
  MISC_FEATURE (21)..(23): Junction
  MISC_FEATURE (24)..(38): Hinge region (Linker)
  MISC_FEATURE (39)..(254): CH2CH3 region
  MISC_FEATURE (255)..(275): PIMS linker
  MISC_FEATURE (276)..(300): Heavy region
  MISC_FEATURE (301)..(308): Heavy chain CDR sub-domain
  MISC_FEATURE (309)..(333): Heavy region
  MISC_FEATURE (334)..(340): Heavy chain CDR sub-domain
  MISC_FEATURE (341)..(371): Heavy region
  MISC_FEATURE (372)..(380): Heavy chain CDR sub-domain
  MISC_FEATURE (381)..(391): Heavy region
  MISC_FEATURE (392)..(406): Hinge region (Linker)
  MISC_FEATURE (407)..(432): Light region
  MISC_FEATURE (433)..(438): Light chain CDR sub-domain
  MISC_FEATURE (439)..(458): Light region
  MISC_FEATURE (459)..(471): Light chain CDR sub-domain
  MISC_FEATURE (472)..(494): Light region
  MISC_FEATURE (495)..(503): Light chain CDR sub-domain
  MISC_FEATURE (504)..(513): Light region
  MISC_FEATURE (514)..(514): Xaa is a stop codon
MEAPAQLLFLLLLWLPDTTGSSSEPKSSDKTHTCPPCPAPELLGGPSVFLFPPKPKDTLMISRTPEVTCVVVDVSHEDPEVKFNWYVDGVEVHNAKTKPREEQYNSTYRVVSVLTVLHQDWLNGKEYKCKVSNKALPAPIEKTISKAKGQPREPQVYTLPPSRDELTKNQVSLTCLVKGFYPSDIAVEWESNGQPENNYKTTPPVLDSDGSFFLYSKLTVDKSRWQQGNVFSCSVMHEALHNHYTQKSLSLSPGQRHNNSSLNTRTQKARHCPNSEVQLVQSGAEVKKPGESLKISCKGSGYSFTGYNMNWVRQMPGKGLEWMGNIDPYYGGTTYNRKFKGQVTISADKSISTAYLQWSSLKASDTAMYYCARSVGPFDSWGQGTLVTVSSGGGGSGGGGSGGGGSEIVLTQSPATLSLSPGERATLSCRASENVYSYLAWYQQKPGQAPRLLIYFAKTLAEGIPARFSGSGSGTDFTLTISSLEPEDFAVYYCQHHSDNPWTFGQGTKVEIKX

SEQ ID NO: 436 - DNA, 1515 bp, Artificial sequence
  Synthetic polynucleotide W0074 nucleotide sequence - full length sequence
atggaagcaccagcgcagcttctcttcctcctgctactctggctcccagataccaccggttcctcgagcgagcccaaatcttctgacaaaactcacacatgcccaccgtgcccagcacctgaactcctgggtggaccgtcagtcttcctcttccccccaaaacccaaggacaccctcatgatctcccggacccctgaggtcacatgcgtggtggtggacgtgagccacgaagaccctgaggtcaagttcaactggtacgtggacggcgtggaggtgcataatgccaagacaaagccgcgggaggagcagtacaacagcacgtaccgtgtggtcagcgtcctcaccgtcctgcaccaggactggctgaatggcaaggagtacaagtgcaaggtctccaacaaagccctcccagcccccatcgagaaaaccatctccaaagccaaagggcagccccgagaaccacaggtgtacaccctgcccccatcccgggatgagctgaccaagaaccaggtcagcctgacctgcctggtcaaaggcttctatccaagcgacatcgccgtggagtgggagagcaatgggcagccggagaacaactacaagaccacgcctcccgtgctggactccgacggctccttcttcctctacagcaagctcaccgtggacaagagcaggtggcagcaggggaacgtcttctcatgctccgtgatgcatgaggctctgcacaaccactacacgcagaagagcctctccctgtctccgggttctccaccttctccgaattctgaggtgcagctggtgcagtctggagcagaggtgaaaaagcccggagagtctctgaagatttcctgtaagggctccggttactcattcactggctacaatatgaactgggtgcgccagatgcccgggaaaggccttgagtggatgggcaatattgatccttattatggtggtactacctacaaccggaagttcaagggccaggtcactatctccgccgacaagtccatcagcaccgcctacctgcaatggagcagcctgaaggcctcggacaccgccatgtattactgtgcacgctcagtcggccctttcgactcctggggccagggcaccctggtcactgtctcctctgggggtggaggctctggtggcggtggatccggtggcggcggatctggcgggggtggctctgaaattgtgttgacacagtctccagccaccctgtctttgtctccaggcgaaagagccaccctctcctgccgagcaagtgaaaatgtttacagctacttagcctggtaccaacagaaacctggccaggctcctaggctcctcatctattttgcaaaaaccttagcagaaggtattccagccaggttcagtggcagtggctccgggacagacttcactctcaccatcagcagcctagagcctgaagattttgcagtttattactgtcaacatcattccgataatccgtggacattcggccaagggaccaaggtggaaatcaaatga

SEQ ID NO: 437 - protein, 505 aa, Artificial sequence
  Synthetic polypeptide W0074 amino acid sequence - full length sequence
  MISC_FEATURE (1)..(20): Leader sequence
  MISC_FEATURE (21)..(23): Junction
  MISC_FEATURE (24)..(38): Hinge region (Linker)
  MISC_FEATURE (39)..(254): CH2CH3 region
  MISC_FEATURE (255)..(261): PIMS linker
  MISC_FEATURE (262)..(286): Heavy region
  MISC_FEATURE (287)..(294): Heavy chain CDR sub-domain
  MISC_FEATURE (295)..(319): Heavy region
  MISC_FEATURE (320)..(326): Heavy chain CDR sub-domain
  MISC_FEATURE (327)..(357): Heavy region
  MISC_FEATURE (358)..(366): Heavy chain CDR sub-domain
  MISC_FEATURE (367)..(377): Heavy region
  MISC_FEATURE (378)..(397): Hinge region (Linker)
  MISC_FEATURE (398)..(423): Light region
  MISC_FEATURE (424)..(429): Light chain CDR sub-domain
  MISC_FEATURE (430)..(449): Light region
  MISC_FEATURE (450)..(462): Light chain CDR sub-domain
  MISC_FEATURE (463)..(485): Light region
  MISC_FEATURE (486)..(494): Light chain CDR sub-domain
  MISC_FEATURE (495)..(504): Light region
  MISC_FEATURE (505)..(505): Xaa is a stop codon
MEAPAQLLFLLLLWLPDTTGSSSEPKSSDKTHTCPPCPAPELLGGPSVFLFPPKPKDTLMISRTPEVTCVVVDVSHEDPEVKFNWYVDGVEVHNAKTKPREEQYNSTYRVVSVLTVLHQDWLNGKEYKCKVSNKALPAPIEKTISKAKGQPREPQVYTLPPSRDELTKNQVSLTCLVKGFYPSDIAVEWESNGQPENNYKTTPPVLDSDGSFFLYSKLTVDKSRWQQGNVFSCSVMHEALHNHYTQKSLSLSPGSPPSPNSEVQLVQSGAEVKKPGESLKISCKGSGYSFTGYNMNWVRQMPGKGLEWMGNIDPYYGGTTYNRKFKGQVTISADKSISTAYLQWSSLKASDTAMYYCARSVGPFDSWGQGTLVTVSSGGGGSGGGGSGGGGSGGGGSEIVLTQSPATLSLSPGERATLSCRASENVYSYLAWYQQKPGQAPRLLIYFAKTLAEGIPARFSGSGSGTDFTLTISSLEPEDFAVYYCQHHSDNPWTFGQGTKVEIKX

SEQ ID NO: 438 - DNA, 1539 bp, Artificial sequence
  Synthetic polynucleotide W0075 nucleotide sequence - full length sequence
atggaagcaccagcgcagcttctcttcctcctgctactctggctcccagataccaccggttcctcgagcgagcccaaatcttctgacaaaactcacacatgcccaccgtgcccagcacctgaactcctgggtggaccgtcagtcttcctcttccccccaaaacccaaggacaccctcatgatctcccggacccctgaggtcacatgcgtggtggtggacgtgagccacgaagaccctgaggtcaagttcaactggtacgtggacggcgtggaggtgcataatgccaagacaaagccgcgggaggagcagtacaacagcacgtaccgtgtggtcagcgtcctcaccgtcctgcaccaggactggctgaatggcaaggagtacaagtgcaaggtctccaacaaagccctcccagcccccatcgagaaaaccatctccaaagccaaagggcagccccgagaaccacaggtgtacaccctgcccccatcccgggatgagctgaccaagaaccaggtcagcctgacctgcctggtcaaaggcttctatccaagcgacatcgccgtggagtgggagagcaatgggcagccggagaacaactacaagaccacgcctcccgtgctggactccgacggctccttcttcctctacagcaagctcaccgtggacaagagcaggtggcagcaggggaacgtcttctcatgctccgtgatgcatgaggctctgcacaaccactacacgcagaagagcctctccctgtctccgggtctgtctgtgaaagctgacttcctcactccatccatcgggaattctgaggtgcagctggtgcagtctggagcagaggtgaaaaagcccggagagtctctgaagatttcctgtaagggctccggttactcattcactggctacaatatgaactgggtgcgccagatgcccgggaaaggccttgagtggatgggcaatattgatccttattatggtggtactacctacaaccggaagttcaagggccaggtcactatctccgccgacaagtccatcagcaccgcctacctgcaatggagcagcctgaaggcctcggacaccgccatgtattactgtgcacgctcagtcggccctttcgactcctggggccagggcaccctggtcactgtctcctctgggggtggaggctctggtggcggtggatccggtggcggcggatctggcgggggtggctctgaaattgtgttgacacagtctccagccaccctgtctttgtctccaggcgaaagagccaccctctcctgccgagcaagtgaaaatgtttacagctacttagcctggtaccaacagaaacctggccaggctcctaggctcctcatctattttgcaaaaaccttagcagaaggtattccagccaggttcagtggcagtggctccgggacagacttcactctcaccatcagcagcctagagcctgaagattttgcagtttattactgtcaacatcattccgataatccgtggacattcggccaagggaccaaggtggaaatcaaatga

SEQ ID NO: 439 - protein, 513 aa, Artificial sequence
  Synthetic polypeptide W0075 amino acid sequence - full length sequence
  MISC_FEATURE (1)..(20): Leader sequence
  MISC_FEATURE (21)..(23): Junction
  MISC_FEATURE (24)..(38): Hinge region (Linker)
  MISC_FEATURE (39)..(254): CH2CH3 region
  MISC_FEATURE (255)..(269): PIMS linker
  MISC_FEATURE (270)..(294): Heavy region
  MISC_FEATURE (295)..(302): Heavy chain CDR sub-domain
  MISC_FEATURE (303)..(327): Heavy region
  MISC_FEATURE (328)..(334): Heavy chain CDR sub-domain
  MISC_FEATURE (335)..(365): Heavy region
  MISC_FEATURE (366)..(374): Heavy chain CDR sub-domain
  MISC_FEATURE (375)..(385): Heavy region
  MISC_FEATURE (386)..(405): Hinge region (Linker)
  MISC_FEATURE (406)..(431): Light region
  MISC_FEATURE (432)..(437): Light chain CDR sub-domain
  MISC_FEATURE (438)..(457): Light region
  MISC_FEATURE (458)..(470): Light chain CDR sub-domain
  MISC_FEATURE (471)..(493): Light region
  MISC_FEATURE (494)..(502): Light chain CDR sub-domain
  MISC_FEATURE (503)..(512): Light region
  MISC_FEATURE (513)..(513): Xaa is a stop codon
MEAPAQLLFLLLLWLPDTTGSSSEPKSSDKTHTCPPCPAPELLGGPSVFLFPPKPKDTLMISRTPEVTCVVVDVSHEDPEVKFNWYVDGVEVHNAKTKPREEQYNSTYRVVSVLTVLHQDWLNGKEYKCKVSNKALPAPIEKTISKAKGQPREPQVYTLPPSRDELTKNQVSLTCLVKGFYPSDIAVEWESNGQPENNYKTTPPVLDSDGSFFLYSKLTVDKSRWQQGNVFSCSVMHEALHNHYTQKSLSLSPGLSVKADFLTPSIGNSEVQLVQSGAEVKKPGESLKISCKGSGYSFTGYNMNWVRQMPGKGLEWMGNIDPYYGGTTYNRKFKGQVTISADKSISTAYLQWSSLKASDTAMYYCARSVGPFDSWGQGTLVTVSSGGGGSGGGGSGGGGSGGGGSEIVLTQSPATLSLSPGERATLSCRASENVYSYLAWYQQKPGQAPRLLIYFAKTLAEGIPARFSGSGSGTDFTLTISSLEPEDFAVYYCQHHSDNPWTFGQGTKVEIKX

SEQ ID NO: 440 - DNA, 1530 bp, Artificial sequence
  Synthetic polynucleotide W0076 nucleotide sequence - full length sequence
atggaagcaccagcgcagcttctcttcctcctgctactctggctcccagataccaccggttcctcgagcgagcccaaatcttctgacaaaactcacacatgcccaccgtgcccagcacctgaactcctgggtggaccgtcagtcttcctcttccccccaaaacccaaggacaccctcatgatctcccggacccctgaggtcacatgcgtggtggtggacgtgagccacgaagaccctgaggtcaagttcaactggtacgtggacggcgtggaggtgcataatgccaagacaaagccgcgggaggagcagtacaacagcacgtaccgtgtggtcagcgtcctcaccgtcctgcaccaggactggctgaatggcaaggagtacaagtgcaaggtctccaacaaagccctcccagcccccatcgagaaaaccatctccaaagccaaagggcagccccgagaaccacaggtgtacaccctgcccccatcccgggatgagctgaccaagaaccaggtcagcctgacctgcctggtcaaaggcttctatccaagcgacatcgccgtggagtgggagagcaatgggcagccggagaacaactacaagaccacgcctcccgtgctggactccgacggctccttcttcctctacagcaagctcaccgtggacaagagcaggtggcagcaggggaacgtcttctcatgctccgtgatgcatgaggctctgcacaaccactacacgcagaagagcctctccctgtctccgggtcagatgaactccgagttgagcgtgctcgcgaattctgaggtgcagctggtgcagtctggagcagaggtgaaaaagcccggagagtctctgaagatttcctgtaagggctccggttactcattcactggctacaatatgaactgggtgcgccagatgcccgggaaaggccttgagtggatgggcaatattgatccttattatggtggtactacctacaaccggaagttcaagggccaggtcactatctccgccgacaagtccatcagcaccgcctacctgcaatggagcagcctgaaggcctcggacaccgccatgtattactgtgcacgctcagtcggccctttcgactcctggggccagggcaccctggtcactgtctcctctgggggtggaggctctggtggcggtggatccggtggcggcggatctggcgggggtggctctgaaattgtgttgacacagtctccagccaccctgtctttgtctccaggcgaaagagccaccctctcctgccgagcaagtgaaaatgtttacagctacttagcctggtaccaacagaaacctggccaggctcctaggctcctcatctattttgcaaaaaccttagcagaaggtattccagccaggttcagtggcagtggctccgggacagacttcactctcaccatcagcagcctagagcctgaagattttgcagtttattactgtcaacatcattccgataatccgtggacattcggccaagggaccaaggtggaaatcaaatga

SEQ ID NO: 441 - protein, 510 aa, Artificial sequence
  Synthetic polypeptide W0076 amino acid sequence - full length sequence
  MISC_FEATURE (1)..(20): Leader sequence
  MISC_FEATURE (21)..(23): Junction
  MISC_FEATURE (24)..(38): Hinge region (Linker)
  MISC_FEATURE (39)..(254): CH2CH3 region
  MISC_FEATURE (255)..(266): PIMS linker
  MISC_FEATURE (267)..(291): Heavy region
  MISC_FEATURE (292)..(299): Heavy chain CDR sub-domain
  MISC_FEATURE (300)..(324): Heavy region
  MISC_FEATURE (325)..(331): Heavy chain CDR sub-domain
  MISC_FEATURE (332)..(362): Heavy region
  MISC_FEATURE (363)..(371): Heavy chain CDR sub-domain
  MISC_FEATURE (372)..(382): Heavy region
  MISC_FEATURE (383)..(402): Hinge region (Linker)
  MISC_FEATURE (403)..(428): Light region
  MISC_FEATURE (429)..(434): Light chain CDR sub-domain
  MISC_FEATURE (435)..(454): Light region
  MISC_FEATURE (455)..(467): Light chain CDR sub-domain
  MISC_FEATURE (468)..(490): Light region
  MISC_FEATURE (491)..(499): Light chain CDR sub-domain
  MISC_FEATURE (500)..(509): Light region
  MISC_FEATURE (510)..(510): Xaa is a stop codon
MEAPAQLLFLLLLWLPDTTGSSSEPKSSDKTHTCPPCPAPELLGGPSVFLFPPKPKDTLMISRTPEVTCVVVDVSHEDPEVKFNWYVDGVEVHNAKTKPREEQYNSTYRVVSVLTVLHQDWLNGKEYKCKVSNKALPAPIEKTISKAKGQPREPQVYTLPPSRDELTKNQVSLTCLVKGFYPSDIAVEWESNGQPENNYKTTPPVLDSDGSFFLYSKLTVDKSRWQQGNVFSCSVMHEALHNHYTQKSLSLSPGQMNSELSVLANSEVQLVQSGAEVKKPGESLKISCKGSGYSFTGYNMNWVRQMPGKGLEWMGNIDPYYGGTTYNRKFKGQVTISADKSISTAYLQWSSLKASDTAMYYCARSVGPFDSWGQGTLVTVSSGGGGSGGGGSGGGGSGGGGSEIVLTQSPATLSLSPGERATLSCRASENVYSYLAWYQQKPGQAPRLLIYFAKTLAEGIPARFSGSGSGTDFTLTISSLEPEDFAVYYCQHHSDNPWTFGQGTKVEIKX

SEQ ID NO: 442 - DNA, 1557 bp, Artificial sequence
  Synthetic polynucleotide W0077 nucleotide sequence - full length sequence
atggaagcaccagcgcagcttctcttcctcctgctactctggctcccagataccaccggttcctcgagcgagcccaaatcttctgacaaaactcacacatgcccaccgtgcccagcacctgaactcctgggtggaccgtcagtcttcctcttccccccaaaacccaaggacaccctcatgatctcccggacccctgaggtcacatgcgtggtggtggacgtgagccacgaagaccctgaggtcaagttcaactggtacgtggacggcgtggaggtgcataatgccaagacaaagccgcgggaggagcagtacaacagcacgtaccgtgtggtcagcgtcctcaccgtcctgcaccaggactggctgaatggcaaggagtacaagtgcaaggtctccaacaaagccctcccagcccccatcgagaaaaccatctccaaagccaaagggcagccccgagaaccacaggtgtacaccctgcccccatcccgggatgagctgaccaagaaccaggtcagcctgacctgcctggtcaaaggcttctatccaagcgacatcgccgtggagtgggagagcaatgggcagccggagaacaactacaagaccacgcctcccgtgctggactccgacggctccttcttcctctacagcaagctcaccgtggacaagagcaggtggcagcaggggaacgtcttctcatgctccgtgatgcatgaggctctgcacaaccactacacgcagaagagcctctccctgtctccgggtcagaggcacaacaattcttccctgaatacaagaactcagaaagcacgtcattgtccgaattctgaggtgcagctggtgcagtctggagcagaggtgaaaaagcccggagagtctctgaagatttcctgtaagggctccggttactcattcactggctacaatatgaactgggtgcgccagatgcccgggaaaggccttgagtggatgggcaatattgatccttattatggtggtactacctacaaccggaagttcaagggccaggtcactatctccgccgacaagtccatcagcaccgcctacctgcaatggagcagcctgaaggcctcggacaccgccatgtattactgtgcacgctcagtcggccctttcgactcctggggccagggcaccctggtcactgtctcctctgggggtggaggctctggtggcggtggatccggtggcggcggatctggcgggggtggctctgaaattgtgttgacacagtctccagccaccctgtctttgtctccaggcgaaagagccaccctctcctgccgagcaagtgaaaatgtttacagctacttagcctggtaccaacagaaacctggccaggctcctaggctcctcatctattttgcaaaaaccttagcagaaggtattccagccaggttcagtggcagtggctccgggacagacttcactctcaccatcagcagcctagagcctgaagattttgcagtttattactgtcaacatcattccgataatccgtggacattcggccaagggaccaaggtggaaatcaaatga

SEQ ID NO: 443 - protein, 519 aa, Artificial sequence
  Synthetic polypeptide W0077 amino acid sequence - full length sequence
  MISC_FEATURE (1)..(20): Leader sequence
  MISC_FEATURE (21)..(23): Junction
  MISC_FEATURE (24)..(38): Hinge region (Linker)
  MISC_FEATURE (39)..(254): CH2CH3 region
  MISC_FEATURE (255)..(275): PIMS linker
  MISC_FEATURE (276)..(300): Heavy region
  MISC_FEATURE (301)..(308): Heavy chain CDR sub-domain
  MISC_FEATURE (309)..(333): Heavy region
  MISC_FEATURE (334)..(340): Heavy chain CDR sub-domain
  MISC_FEATURE (341)..(371): Heavy region
  MISC_FEATURE (372)..(380): Heavy chain CDR sub-domain
  MISC_FEATURE (381)..(391): Heavy region
  MISC_FEATURE (392)..(411): Hinge region (Linker)
  MISC_FEATURE (412)..(437): Light region
  MISC_FEATURE (438)..(443): Light chain CDR sub-domain
  MISC_FEATURE (444)..(463): Light region
  MISC_FEATURE (464)..(476): Light chain CDR sub-domain
  MISC_FEATURE (477)..(499): Light region
  MISC_FEATURE (500)..(508): Light chain CDR sub-domain
  MISC_FEATURE (509)..(518): Light region
  MISC_FEATURE (519)..(519): Xaa is a stop codon
MEAPAQLLFLLLLWLPDTTGSSSEPKSSDKTHTCPPCPAPELLGGPSVFLFPPKPKDTLMISRTPEVTCVVVDVSHEDPEVKFNWYVDGVEVHNAKTKPREEQYNSTYRVVSVLTVLHQDWLNGKEYKCKVSNKALPAPIEKTISKAKGQPREPQVYTLPPSRDELTKNQVSLTCLVKGFYPSDIAVEWESNGQPENNYKTTPPVLDSDGSFFLYSKLTVDKSRWQQGNVFSCSVMHEALHNHYTQKSLSLSPGQRHNNSSLNTRTQKARHCPNSEVQLVQSGAEVKKPGESLKISCKGSGYSFTGYNMNWVRQMPGKGLEWMGNIDPYYGGTTYNRKFKGQVTISADKSISTAYLQWSSLKASDTAMYYCARSVGPFDSWGQGTLVTVSSGGGGSGGGGSGGGGSGGGGSEIVLTQSPATLSLSPGERATLSCRASENVYSYLAWYQQKPGQAPRLLIYFAKTLAEGIPARFSGSGSGTDFTLTISSLEPEDFAVYYCQHHSDNPWTFGQGTKVEIKX

SEQ ID NO: 444 - DNA, 1572 bp, Artificial sequence
  Synthetic polynucleotide W0094 nucleotide sequence - full length sequence
atggaagcaccagcgcagcttctcttcctcctgctactctggctcccagataccaccggttcctcgagcgagcccaaatcttctgacaaaactcacacatgcccaccgtgcccagcacctgaactcctgggtggaccgtcagtcttcctcttccccccaaaacccaaggacaccctcatgatctcccggacccctgaggtcacatgcgtggtggtggacgtgagccacgaagaccctgaggtcaagttcaactggtacgtggacggcgtggaggtgcataatgccaagacaaagccgcgggaggagcagtacaacagcacgtaccgtgtggtcagcgtcctcaccgtcctgcaccaggactggctgaatggcaaggagtacaagtgcaaggtctccaacaaagccctcccagcccccatcgagaaaaccatctccaaagccaaagggcagccccgagaaccacaggtgtacaccctgcccccatcccgggatgagctgaccaagaaccaggtcagcctgacctgcctggtcaaaggcttctatccaagcgacatcgccgtggagtgggagagcaatgggcagccggagaacaactacaagaccacgcctcccgtgctggactccgacggctccttcttcctctacagcaagctcaccgtggacaagagcaggtggcagcaggggaacgtcttctcatgctccgtgatgcatgaggctctgcacaaccactacacgcagaagagcctctccctgtctccgggtcagaggcacaacaattcttccctgaatacaagaactcagaaagcacgtcattctccgaattctgaggtgcagctggtgcagtctggagcagaggtgaaaaagcccggagagtctctgaagatttcctgtaagggctccggttactcattcactggctacaatatgaactgggtgcgccagatgcccgggaaaggccttgagtggatgggcaatattgatccttattatggtggtactacctacaaccggaagttcaagggccaggtcactatctccgccgacaagtccatcagcaccgcctacctgcaatggagcagcctgaaggcctcggacaccgccatgtattactgtgcacgctcagtcggccctttcgactcctggggccagggcaccctggtcactgtctcctctgggggtggaggctctggtggcggtggctctggcggaggtggatccggtggcggcggatctggcgggggtggctctgaaattgtgttgacacagtctccagccaccctgtctttgtctccaggcgaaagagccaccctctcctgccgagcaagtgaaaatgtttacagctacttagcctggtaccaacagaaacctggccaggctcctaggctcctcatctattttgcaaaaaccttagcagaaggtattccagccaggttcagtggcagtggctccgggacagacttcactctcaccatcagcagcctagagcctgaagattttgcagtttattactgtcaacatcattccgataatccgtggacattcggccaagggaccaaggtggaaatcaaatga

SEQ ID NO: 445 - protein, 524 aa, Artificial sequence
  Synthetic polypeptide W0094 amino acid sequence - full length sequence
  MISC_FEATURE (1)..(20): Leader sequence
  MISC_FEATURE (21)..(23): Junction
  MISC_FEATURE (24)..(38): Hinge region (Linker)
  MISC_FEATURE (39)..(254): CH2CH3 region
  MISC_FEATURE (255)..(275): PIMS linker
  MISC_FEATURE (276)..(300): Heavy region
  MISC_FEATURE (301)..(308): Heavy chain CDR sub-domain
  MISC_FEATURE (309)..(333): Heavy region
  MISC_FEATURE (334)..(340): Heavy chain CDR sub-domain
  MISC_FEATURE (341)..(371): Heavy region
  MISC_FEATURE (372)..(380): Heavy chain CDR sub-domain
  MISC_FEATURE (381)..(391): Heavy region
  MISC_FEATURE (392)..(416): Hinge region (Linker)
  MISC_FEATURE (417)..(442): Light region
  MISC_FEATURE (442)..(448): Light chain CDR sub-domain
  MISC_FEATURE (449)..(468): Light region
  MISC_FEATURE (469)..(481): Light chain CDR sub-domain
  MISC_FEATURE (482)..(504): Light region
  MISC_FEATURE (505)..(513): Light chain CDR sub-domain
  MISC_FEATURE (514)..(523): Light region
  MISC_FEATURE (524)..(524): Xaa is a stop codon
MEAPAQLLFLLLLWLPDTTGSSSEPKSSDKTHTCPPCPAPELLGGPSVFLFPPKPKDTLMISRTPEVTCVVVDVSHEDPEVKFNWYVDGVEVHNAKTKPREEQYNSTYRVVSVLTVLHQDWLNGKEYKCKVSNKALPAPIEKTISKAKGQPREPQVYTLPPSRDELTKNQVSLTCLVKGFYPSDIAVEWESNGQPENNYKTTPPVLDSDGSFFLYSKLTVDKSRWQQGNVFSCSVMHEALHNHYTQKSLSLSPGQRHNNSSLNTRTQKARHSPNSEVQLVQSGAEVKKPGESLKISCKGSGYSFTGYNMNWVRQMPGKGLEWMGNIDPYYGGTTYNRKFKGQVTISADKSISTAYLQWSSLKASDTAMYYCARSVGPFDSWGQGTLVTVSSGGGGSGGGGSGGGGSGGGGSGGGGSEIVLTQSPATLSLSPGERATLSCRASENVYSYLAWYQQKPGQAPRLLIYFAKTLAEGIPARFSGSGSGTDFTLTISSLEPEDFAVYYCQHHSDNPWTFGQGTKVEIKX

SEQ ID NO: 446 - DNA, 1527 bp, Artificial sequence
  Synthetic polynucleotide W0095 nucleotide sequence - full length sequence
atggaagcaccagcgcagcttctcttcctcctgctactctggctcccagataccaccggttcctcgagcgagcccaaatcttctgacaaaactcacacatgcccaccgtgcccagcacctgaactcctgggtggaccgtcagtcttcctcttccccccaaaacccaaggacaccctcatgatctcccggacccctgaggtcacatgcgtggtggtggacgtgagccacgaagaccctgaggtcaagttcaactggtacgtggacggcgtggaggtgcataatgccaagacaaagccgcgggaggagcagtacaacagcacgtaccgtgtggtcagcgtcctcaccgtcctgcaccaggactggctgaatggcaaggagtacaagtgcaaggtctccaacaaagccctcccagcccccatcgagaaaaccatctccaaagccaaagggcagccccgagaaccacaggtgtacaccctgcccccatcccgggatgagctgaccaagaaccaggtcagcctgacctgcctggtcaaaggcttctatccaagcgacatcgccgtggagtgggagagcaatgggcagccggagaacaactacaagaccacgcctcccgtgctggactccgacggctccttcttcctctacagcaagctcaccgtggacaagagcaggtggcagcaggggaacgtcttctcatgctccgtgatgcatgaggctctgcacaaccactacacgcagaagagcctctccctgtctccgggtcagaggcacaacaattcttccctgaatacaagaactcagaaagcacgtcattctccgaattctgaggtgcagctggtgcagtctggagcagaggtgaaaaagcccggagagtctctgaagatttcctgtaagggctccggttactcattcactggctacaatatgaactgggtgcgccagatgcccgggaaaggccttgagtggatgggcaatattgatccttattatggtggtactacctacaaccggaagttcaagggccaggtcactatctccgccgacaagtccatcagcaccgcctacctgcaatggagcagcctgaaggcctcggacaccgccatgtattactgtgcacgctcagtcggccctttcgactcctggggccagggcaccctggtcactgtctcctctgggggtggaggctctggtggcggtggatccgaaattgtgttgacacagtctccagccaccctgtctttgtctccaggcgaaagagccaccctctcctgccgagcaagtgaaaatgtttacagctacttagcctggtaccaacagaaacctggccaggctcctaggctcctcatctattttgcaaaaaccttagcagaaggtattccagccaggttcagtggcagtggctccgggacagacttcactctcaccatcagcagcctagagcctgaagattttgcagtttattactgtcaacatcattccgataatccgtggacattcggccaagggaccaaggtggaaatcaaatga

SEQ ID NO: 447 - protein, 509 aa, Artificial sequence
  Synthetic polypeptide W0095 amino acid sequence - full length sequence
  MISC_FEATURE (1)..(20): Leader sequence
  MISC_FEATURE (21)..(23): Junction
  MISC_FEATURE (24)..(38): Hinge region (Linker)
  MISC_FEATURE (39)..(254): CH2CH3 region
  MISC_FEATURE (255)..(275): PIMS linker
  MISC_FEATURE (276)..(300): Heavy region
  MISC_FEATURE (301)..(308): Heavy chain CDR sub-domain
  MISC_FEATURE (309)..(333): Heavy region
  MISC_FEATURE (334)..(340): Heavy chain CDR sub-domain
  MISC_FEATURE (341)..(371): Heavy region
  MISC_FEATURE (372)..(380): Heavy chain CDR sub-domain
  MISC_FEATURE (381)..(391): Heavy region
  MISC_FEATURE (392)..(401): Hinge region (Linker)
  MISC_FEATURE (402)..(427): Light region
  MISC_FEATURE (428)..(433): Light chain CDR sub-domain
  MISC_FEATURE (434)..(453): Light region
  MISC_FEATURE (454)..(466): Light chain CDR sub-domain
  MISC_FEATURE (467)..(489): Light region
  MISC_FEATURE (490)..(498): Light chain CDR sub-domain
  MISC_FEATURE (499)..(508): Light region
  MISC_FEATURE (509)..(509): Xaa is a stop codon
MEAPAQLLFLLLLWLPDTTGSSSEPKSSDKTHTCPPCPAPELLGGPSVFLFPPKPKDTLMISRTPEVTCVVVDVSHEDPEVKFNWYVDGVEVHNAKTKPREEQYNSTYRVVSVLTVLHQDWLNGKEYKCKVSNKALPAPIEKTISKAKGQPREPQVYTLPPSRDELTKNQVSLTCLVKGFYPSDIAVEWESNGQPENNYKTTPPVLDSDGSFFLYSKLTVDKSRWQQGNVFSCSVMHEALHNHYTQKSLSLSPGQRHNNSSLNTRTQKARHSPNSEVQLVQSGAEVKKPGESLKISCKGSGYSFTGYNMNWVRQMPGKGLEWMGNIDPYYGGTTYNRKFKGQVTISADKSISTAYLQWSSLKASDTAMYYCARSVGPFDSWGQGTLVTVSSGGGGSGGGGSEIVLTQSPATLSLSPGERATLSCRASENVYSYLAWYQQKPGQAPRLLIYFAKTLAEGIPARFSGSGSGTDFTLTISSLEPEDFAVYYCQHHSDNPWTFGQGTKVEIKX

SEQ ID NO: 448 - DNA, 1542 bp, Artificial sequence
  Synthetic polynucleotide W0096 nucleotide sequence - full length sequence
atggaagcaccagcgcagcttctcttcctcctgctactctggctcccagataccaccggttcctcgagcgagcccaaatcttctgacaaaactcacacatgcccaccgtgcccagcacctgaactcctgggtggaccgtcagtcttcctcttccccccaaaacccaaggacaccctcatgatctcccggacccctgaggtcacatgcgtggtggtggacgtgagccacgaagaccctgaggtcaagttcaactggtacgtggacggcgtggaggtgcataatgccaagacaaagccgcgggaggagcagtacaacagcacgtaccgtgtggtcagcgtcctcaccgtcctgcaccaggactggctgaatggcaaggagtacaagtgcaaggtctccaacaaagccctcccagcccccatcgagaaaaccatctccaaagccaaagggcagccccgagaaccacaggtgtacaccctgcccccatcccgggatgagctgaccaagaaccaggtcagcctgacctgcctggtcaaaggcttctatccaagcgacatcgccgtggagtgggagagcaatgggcagccggagaacaactacaagaccacgcctcccgtgctggactccgacggctccttcttcctctacagcaagctcaccgtggacaagagcaggtggcagcaggggaacgtcttctcatgctccgtgatgcatgaggctctgcacaaccactacacgcagaagagcctctccctgtctccgggtcagaggcacaacaattcttccctgaatacaagaactcagaaagcacgtcattctccgaattctgaggtgcagctggtgcagtctggagcagaggtgaaaaagcccggagagtctctgaagatttcctgtaagggctccggttactcattcactggctacaatatgaactgggtgcgccagatgcccgggaaaggccttgagtggatgggcaatattgatccttattatggtggtactacctacaaccggaagttcaagggccaggtcactatctccgccgacaagtccatcagcaccgcctacctgcaatggagcagcctgaaggcctcggacaccgccatgtattactgtgcacgctcagtcggccctttcgactcctggggccagggcaccctggtcactgtctcctctgggggtggaggctctggtggcggtggctctggcggaggtggatccgaaattgtgttgacacagtctccagccaccctgtctttgtctccaggcgaaagagccaccctctcctgccgagcaagtgaaaatgtttacagctacttagcctggtaccaacagaaacctggccaggctcctaggctcctcatctattttgcaaaaaccttagcagaaggtattccagccaggttcagtggcagtggctccgggacagacttcactctcaccatcagcagcctagagcctgaagattttgcagtttattactgtcaacatcattccgataatccgtggacattcggccaagggaccaaggtggaaatcaaatga

SEQ ID NO: 449 - protein, 519 aa, Artificial sequence
  Synthetic polypeptide W0096 amino acid sequence - full length sequence
  MISC_FEATURE (1)..(20): Leader sequence
  MISC_FEATURE (21)..(23): Junction
  MISC_FEATURE (24)..(38): Hinge region (Linker)
  MISC_FEATURE (39)..(254): CH2CH3 region
  MISC_FEATURE (255)..(275): PIMS linker
  MISC_FEATURE (276)..(300): Heavy region
  MISC_FEATURE (301)..(308): Heavy chain CDR sub-domain
  MISC_FEATURE (309)..(333): Heavy region
  MISC_FEATURE (334)..(340): Heavy chain CDR sub-domain
  MISC_FEATURE (341)..(371): Heavy region
  MISC_FEATURE (372)..(380): Heavy chain CDR sub-domain
  MISC_FEATURE (381)..(391): Heavy region
  MISC_FEATURE (392)..(411): Hinge region (Linker)
  MISC_FEATURE (412)..(437): Light region
  MISC_FEATURE (438)..(443): Light chain CDR sub-domain
  MISC_FEATURE (444)..(463): Light region
  MISC_FEATURE (464)..(476): Light chain CDR sub-domain
  MISC_FEATURE (477)..(499): Light region
  MISC_FEATURE (500)..(508): Light chain CDR sub-domain
  MISC_FEATURE (509)..(518): Light region
  MISC_FEATURE (519)..(519): Xaa is a stop codon
MEAPAQLLFLLLLWLPDTTGSSSEPKSSDKTHTCPPCPAPELLGGPSVFLFPPKPKDTLMISRTPEVTCVVVDVSHEDPEVKFNWYVDGVEVHNAKTKPREEQYNSTYRVVSVLTVLHQDWLNGKEYKCKVSNKALPAPIEKTISKAKGQPREPQVYTLPPSRDELTKNQVSLTCLVKGFYPSDIAVEWESNGQPENNYKTTPPVLDSDGSFFLYSKLTVDKSRWQQGNVFSCSVMHEALHNHYTQKSLSLSPGQRHNNSSLNTRTQKARHSPNSEVQLVQSGAEVKKPGESLKISCKGSGYSFTGYNMNWVRQMPGKGLEWMGNIDPYYGGTTYNRKFKGQVTISADKSISTAYLQWSSLKASDTAMYYCARSVGPFDSWGQGTLVTVSSGGGGSGGGGSGGGGSGGGGSEIVLTQSPATLSLSPGERATLSCRASENVYSYLAWYQQKPGQAPRLLIYFAKTLAEGIPARFSGSGSGTDFTLTISSLEPEDFAVYYCQHHSDNPWTFGQGTKVEIKX

SEQ ID NO: 450 - DNA, 1557 bp, Artificial sequence
  Synthetic polynucleotide W0097 nucleotide sequence - full length sequence
atggaagcaccagcgcagcttctcttcctcctgctactctggctcccagataccaccggttcctcgagcgagcccaaatcttctgacaaaactcacacatgcccaccgtgcccagcacctgaactcctgggtggaccgtcagtcttcctcttccccccaaaacccaaggacaccctcatgatctcccggacccctgaggtcacatgcgtggtggtggacgtgagccacgaagaccctgaggtcaagttcaactggtacgtggacggcgtggaggtgcataatgccaagacaaagccgcgggaggagcagtacaacagcacgtaccgtgtggtcagcgtcctcaccgtcctgcaccaggactggctgaatggcaaggagtacaagtgcaaggtctccaacaaagccctcccagcccccatcgagaaaaccatctccaaagccaaagggcagccccgagaaccacaggtgtacaccctgcccccatcccgggatgagctgaccaagaaccaggtcagcctgacctgcctggtcaaaggcttctatccaagcgacatcgccgtggagtgggagagcaatgggcagccggagaacaactacaagaccacgcctcccgtgctggactccgacggctccttcttcctctacagcaagctcaccgtggacaagagcaggtggcagcaggggaacgtcttctcatgctccgtgatgcatgaggctctgcacaaccactacacgcagaagagcctctccctgtctccgggtcagaggcacaacaattcttccctgaatacaagaactcagaaagcacgtcattctccgaattctgaggtgcagctggtgcagtctggagcagaggtgaaaaagcccggagagtctctgaagatttcctgtaagggctccggttactcattcactggctacaatatgaactgggtgcgccagatgcccgggaaaggccttgagtggatgggcaatattgatccttattatggtggtactacctacaaccggaagttcaagggccaggtcactatctccgccgacaagtccatcagcaccgcctacctgcaatggagcagcctgaaggcctcggacaccgccatgtattactgtgcacgctcagtcggccctttcgactcctggggccagggcaccctggtcactgtctcctctgggggtggaggctctggtggcggtggatccggtggcggcggatctggcgggggtggctctgaaattgtgttgacacagtctccagccaccctgtctttgtctccaggcgaaagagccaccctctcctgccgagcaagtgaaaatgtttacagctacttagcctggtaccaacagaaacctggccaggctcctaggctcctcatctattttgcaaaaaccttagcagaaggtattccagccaggttcagtggcagtggctccgggacagacttcactctcaccatcagcagcctagagcctgaagattttgcagtttattactgtcaacatcattccgataatccgtggacattcggccaagggaccaaggtggaaatcaaatga

SEQ ID NO: 451 - protein, 519 aa, Artificial sequence; identical to SEQ ID NO: 449
  Synthetic polypeptide W0097 amino acid sequence - full length sequence
  MISC_FEATURE (1)..(20): Leader sequence
  MISC_FEATURE (21)..(23): Junction
  MISC_FEATURE (24)..(38): Hinge region (Linker)
  MISC_FEATURE (39)..(254): CH2CH3 region
  MISC_FEATURE (255)..(275): PIMS linker
  MISC_FEATURE (276)..(300): Heavy region
  MISC_FEATURE (301)..(308): Heavy chain CDR sub-domain
  MISC_FEATURE (309)..(333): Heavy region
  MISC_FEATURE (334)..(340): Heavy chain CDR sub-domain
  MISC_FEATURE (341)..(371): Heavy region
  MISC_FEATURE (372)..(380): Heavy chain CDR sub-domain
  MISC_FEATURE (381)..(391): Heavy region
  MISC_FEATURE (392)..(411): Hinge region (Linker)
  MISC_FEATURE (412)..(437): Light region
  MISC_FEATURE (438)..(443): Light chain CDR sub-domain
  MISC_FEATURE (444)..(463): Light region
  MISC_FEATURE (464)..(476): Light chain CDR sub-domain
  MISC_FEATURE (477)..(499): Light region
  MISC_FEATURE (500)..(508): Light chain CDR sub-domain
  MISC_FEATURE (509)..(518): Light region
  MISC_FEATURE (519)..(519): Xaa is a stop codon

SEQ ID NO: 452 - DNA, 1557 bp, Artificial sequence
  Synthetic polynucleotide W0050 nucleotide sequence - full length sequence
aagcttgccgccatggaagcaccagcgcagcttctcttcctcctgctactctggctcccagataccaccggttcctcgagcgagcccaaatcttctgacaaaactcacacatgcccaccgtgcccagcacctgaactcctgggtggaccgtcagtcttcctcttccccccaaaacccaaggacaccctcatgatctcccggacccctgaggtcacatgcgtggtggtggacgtgagccacgaagaccctgaggtcaagttcaactggtacgtggacggcgtggaggtgcataatgccaagacaaagccgcgggaggagcagtacaacagcacgtaccgtgtggtcagcgtcctcaccgtcctgcaccaggactggctgaatggcaaggagtacaagtgcaaggtctccaacaaagccctcccagcccccatcgagaaaaccatctccaaagccaaagggcagccccgagaaccacaggtgtacaccctgcccccatcccgggatgagctgaccaagaaccaggtcagcctgacctgcctggtcaaaggcttctatccaagcgacatcgccgtggagtgggagagcaatgggcagccggagaacaactacaagaccacgcctcccgtgctggactccgacggctccttcttcctctacagcaagctcaccgtggacaagagcaggtggcagcaggggaacgtcttctcatgctccgtgatgcatgaggctctgcacaaccactacacgcagaagagcctctccctgtctccgggttctccaccttctccgaattctcaggtgcagctgaaggagtcagggcctggcagcgtggcgccctcacagagcctgtccatcacatgcaccgtctcagggttctcattaaccggctatggtgtaaactgggttcgccagcctccaggaaagggtctggagtggctgggaatgatatggggtgatggaagcacagactataattcagctctcaaatccagactatcgatcaccaaggacaactccaagagccaagttttcttaaaaatgaacagtctgcaaactgatgacacagccagatactactgtgctcgagatggttatagtaactttcattactatgttatggactactggggtcaaggaacctcagtcaccgtctcctctgggggtggaggctctggtggcggtggatccggcggaggtgggtcgggtggcggcggatctgacattgtgctcacccaatctccagcttctttggctgtgtctctaggtcagagagccaccatctcctgcagagccagtgaaagtgttgaatattatgtcacaagtttaatgcagtggtaccaacagaaaccaggacagccacccaagctcctcatctctgctgctagcaacgtagaatctggggtccctgccaggtttagtggcagtgggtctgggacagactttagcctcaacatccatcctgtggaggaggatgatattgcaatgtatttctgtcagcaaagtaggaaggttccatggacgttcggtggaggcaccaagctggaaatcaaacgttaa

SEQ ID NO: 453 - protein, 515 aa, Artificial sequence
  Synthetic polypeptide W0050 amino acid sequence - full length sequence
  MISC_FEATURE (1)..(20): Leader sequence
  MISC_FEATURE (21)..(23): Junction
  MISC_FEATURE (24)..(38): Hinge region (Linker)
  MISC_FEATURE (39)..(254): CH2CH3 region
  MISC_FEATURE (255)..(261): PIMS linker
  MISC_FEATURE (262)..(286): Heavy region
  MISC_FEATURE (287)..(294): Heavy chain CDR sub-domain
  MISC_FEATURE (295)..(311): Heavy region
  MISC_FEATURE (312)..(318): Heavy chain CDR sub-domain
  MISC_FEATURE (319)..(356): Heavy region
  MISC_FEATURE (357)..(371): Heavy chain CDR sub-domain
  MISC_FEATURE (372)..(382): Heavy region
  MISC_FEATURE (383)..(402): Heavy region
  MISC_FEATURE (403)..(428): Light region
  MISC_FEATURE (429)..(438): Light chain CDR sub-domain
  MISC_FEATURE (439)..(455): Light region
  MISC_FEATURE (456)..(458): Light chain CDR sub-domain
  MISC_FEATURE (459)..(494): Light region
  MISC_FEATURE (495)..(503): Light chain CDR sub-domain
  MISC_FEATURE (504)..(513): Light region
  MISC_FEATURE (515)..(515): Xaa is a stop codon
MEAPAQLLFLLLLWLPDTTGSSSEPKSSDKTHTCPPCPAPELLGGPSVFLFPPKPKDTLMISRTPEVTCVVVDVSHEDPEVKFNWYVDGVEVHNAKTKPREEQYNSTYRVVSVLTVLHQDWLNGKEYKCKVSNKALPAPIEKTISKAKGQPREPQVYTLPPSRDELTKNQVSLTCLVKGFYPSDIAVEWESNGQPENNYKTTPPVLDSDGSFFLYSKLTVDKSRWQQGNVFSCSVMHEALHNHYTQKSLSLSPGSPPSPNSQVQLKESGPGSVAPSQSLSITCTVSGFSLTGYGVNWVRQPPGKGLEWLGMIWGDGSTDYNSALKSRLSITKDNSKSQVFLKMNSLQTDDTARYYCARDGYSNFHYYVMDYWGQGTSVTVSSGGGGSGGGGSGGGGSGGGGSDIVLTQSPASLAVSLGQRATISCRASESVEYYVTSLMQWYQQKPGQPPKLLISAASNVESGVPARFSGSGSGTDFSLNIHPVEEDDIAMYFCQQSRKVPWTFGGGTKLEIKRX

SEQ ID NO: 454 - DNA, 1581 bp, Artificial sequence
  Synthetic polynucleotide W0051 nucleotide sequence - full length sequence
aagcttgccgccatggaagcaccagcgcagcttctcttcctcctgctactctggctcccagataccaccggttcctcgagcgagcccaaatcttctgacaaaactcacacatgcccaccgtgcccagcacctgaactcctgggtggaccgtcagtcttcctcttccccccaaaacccaaggacaccctcatgatctcccggacccctgaggtcacatgcgtggtggtggacgtgagccacgaagaccctgaggtcaagttcaactggtacgtggacggcgtggaggtgcataatgccaagacaaagccgcgggaggagcagtacaacagcacgtaccgtgtggtcagcgtcctcaccgtcctgcaccaggactggctgaatggcaaggagtacaagtgcaaggtctccaacaaagccctcccagcccccatcgagaaaaccatctccaaagccaaagggcagccccgagaaccacaggtgtacaccctgcccccatcccgggatgagctgaccaagaaccaggtcagcctgacctgcctggtcaaaggcttctatccaagcgacatcgccgtggagtgggagagcaatgggcagccggagaacaactacaagaccacgcctcccgtgctggactccgacggctccttcttcctctacagcaagctcaccgtggacaagagcaggtggcagcaggggaacgtcttctcatgctccgtgatgcatgaggctctgcacaaccactacacgcagaagagcctctccctgtctccgggtctgtctgtgaaagctgacttcctcactccatccatcgggaattctcaggtgcagctgaaggagtcagggcctggcagcgtggcgccctcacagagcctgtccatcacatgcaccgtctcagggttctcattaaccggctatggtgtaaactgggttcgccagcctccaggaaagggtctggagtggctgggaatgatatggggtgatggaagcacagactataattcagctctcaaatccagactatcgatcaccaaggacaactccaagagccaagttttcttaaaaatgaacagtctgcaaactgatgacacagccagatactactgtgctcgagatggttatagtaactttcattactatgttatggactactggggtcaaggaacctcagtcaccgtctcctctgggggtggaggctctggtggcggtggatccggcggaggtgggtcgggtggcggcggatctgacattgtgctcacccaatctccagcttctttggctgtgtctctaggtcagagagccaccatctcctgcagagccagtgaaagtgttgaatattatgtcacaagtttaatgcagtggtaccaacagaaaccaggacagccacccaagctcctcatctctgctgctagcaacgtagaatctggggtccctgccaggtttagtggcagtgggtctgggacagactttagcctcaacatccatcctgtggaggaggatgatattgcaatgtatttctgtcagcaaagtaggaaggttccatggacgttcggtggaggcaccaagctggaaatcaaacgttaa

SEQ ID NO: 455 - protein, 523 aa, Artificial sequence
  Synthetic polypeptide W0051 amino acid sequence - full length sequence
  MISC_FEATURE (1)..(20): Leader sequence
  MISC_FEATURE (21)..(23): Junction
  MISC_FEATURE (24)..(38): Hinge region (Linker)
  MISC_FEATURE (39)..(254): CH2CH3 region
  MISC_FEATURE (255)..(269): PIMS linker
  MISC_FEATURE (270)..(294): Heavy region
  MISC_FEATURE (295)..(302): Heavy chain CDR sub-domain
  MISC_FEATURE (303)..(319): Heavy region
  MISC_FEATURE (320)..(326): Heavy chain CDR sub-domain
  MISC_FEATURE (327)..(364): Heavy region
  MISC_FEATURE (365)..(379): Heavy chain CDR sub-domain
  MISC_FEATURE (380)..(390): Heavy region
  MISC_FEATURE (391)..(410): Hinge region (Linker)
  MISC_FEATURE (411)..(436): Light region
  MISC_FEATURE (437)..(446): Light chain CDR sub-domain
  MISC_FEATURE (447)..(463): Light region
  MISC_FEATURE (464)..(466): Light chain CDR sub-domain
  MISC_FEATURE (467)..(502): Light region
  MISC_FEATURE (503)..(511): Light chain CDR sub-domain
  MISC_FEATURE (512)..(521): Light region
  MISC_FEATURE (523)..(523): Xaa is a stop codon
MEAPAQLLFLLLLWLPDTTGSSSEPKSSDKTHTCPPCPAPELLGGPSVFLFPPKPKDTLMISRTPEVTCVVVDVSHEDPEVKFNWYVDGVEVHNAKTKPREEQYNSTYRVVSVLTVLHQDWLNGKEYKCKVSNKALPAPIEKTISKAKGQPREPQVYTLPPSRDELTKNQVSLTCLVKGFYPSDIAVEWESNGQPENNYKTTPPVLDSDGSFFLYSKLTVDKSRWQQGNVFSCSVMHEALHNHYTQKSLSLSPGLSVKADFLTPSIGNSQVQLKESGPGSVAPSQSLSITCTVSGFSLTGYGVNWVRQPPGKGLEWLGMIWGDGSTDYNSALKSRLSITKDNSKSQVFLKMNSLQTDDTARYYCARDGYSNFHYYVMDYWGQGTSVTVSSGGGGSGGGGSGGGGSGGGGSDIVLTQSPASLAVSLGQRATISCRASESVEYYVTSLMQWYQQKPGQPPKLLISAASNVESGVPARFSGSGSGTDFSLNIHPVEEDDIAMYFCQQSRKVPWTFGGGTKLEIKRX

SEQ ID NO: 456 - DNA, 1572 bp, Artificial sequence
  Synthetic polynucleotide W0052 nucleotide sequence - full length sequence
aagcttgccgccatggaagcaccagcgcagcttctcttcctcctgctactctggctcccagataccaccggttcctcgagcgagcccaaatcttctgacaaaactcacacatgcccaccgtgcccagcacctgaactcctgggtggaccgtcagtcttcctcttccccccaaaacccaaggacaccctcatgatctcccggacccctgaggtcacatgcgtggtggtggacgtgagccacgaagaccctgaggtcaagttcaactggtacgtggacggcgtggaggtgcataatgccaagacaaagccgcgggaggagcagtacaacagcacgtaccgtgtggtcagcgtcctcaccgtcctgcaccaggactggctgaatggcaaggagtacaagtgcaaggtctccaacaaagccctcccagcccccatcgagaaaaccatctccaaagccaaagggcagccccgagaaccacaggtgtacaccctgcccccatcccgggatgagctgaccaagaaccaggtcagcctgacctgcctggtcaaaggcttctatccaagcgacatcgccgtggagtgggagagcaatgggcagccggagaacaactacaagaccacgcctcccgtgctggactccgacggctccttcttcctctacagcaagctcaccgtggacaagagcaggtggcagcaggggaacgtcttctcatgctccgtgatgcatgaggctctgcacaaccactacacgcagaagagcctctccctgtctccgggtcagatgaactccgagttgagcgtgctcgcgaattctcaggtgcagctgaaggagtcagggcctggcagcgtggcgccctcacagagcctgtccatcacatgcaccgtctcagggttctcattaaccggctatggtgtaaactgggttcgccagcctccaggaaagggtctggagtggctgggaatgatatggggtgatggaagcacagactataattcagctctcaaatccagactatcgatcaccaaggacaactccaagagccaagttttcttaaaaatgaacagtctgcaaactgatgacacagccagatactactgtgctcgagatggttatagtaactttcattactatgttatggactactggggtcaaggaacctcagtcaccgtctcctctgggggtggaggctctggtggcggtggatccggcggaggtgggtcgggtggcggcggatctgacattgtgctcacccaatctccagcttctttggctgtgtctctaggtcagagagccaccatctcctgcagagccagtgaaagtgttgaatattatgtcacaagtttaatgcagtggtaccaacagaaaccaggacagccacccaagctcctcatctctgctgctagcaacgtagaatctggggtccctgccaggtttagtggcagtgggtctgggacagactttagcctcaacatccatcctgtggaggaggatgatattgcaatgtatttctgtcagcaaagtaggaaggttccatggacgttcggtggaggcaccaagctggaaatcaaacgttaa

SEQ ID NO: 457 - protein, 520 aa, Artificial sequence
  Synthetic polypeptide W0052 amino acid sequence - full length sequence
  MISC_FEATURE (1)..(20): Leader sequence
  MISC_FEATURE (21)..(23): Junction
  MISC_FEATURE (24)..(38): Hinge region (Linker)
  MISC_FEATURE (39)..(254): CH2CH3 region
  MISC_FEATURE (255)..(266): PIMS linker
  MISC_FEATURE (267)..(291): Heavy region
  MISC_FEATURE (292)..(299): Heavy chain CDR sub-domain
  MISC_FEATURE (300)..(316): Heavy region
  MISC_FEATURE (317)..(323): Heavy chain CDR sub-domain
  MISC_FEATURE (324)..(361): Heavy region
  MISC_FEATURE (362)..(376): Heavy chain CDR sub-domain
  MISC_FEATURE (377)..(387): Heavy region
  MISC_FEATURE (388)..(407): Hinge region (Linker)
  MISC_FEATURE (408)..(433): Light region
  MISC_FEATURE (434)..(443): Light chain CDR sub-domain
  MISC_FEATURE (444)..(460): Light region
  MISC_FEATURE (461)..(463): Light chain CDR sub-domain
  MISC_FEATURE (464)..(499): Light region
  MISC_FEATURE (500)..(508): Light chain CDR sub-domain
  MISC_FEATURE (509)..(518): Light region
  MISC_FEATURE (520)..(520): Xaa is a stop codon
MEAPAQLLFLLLLWLPDTTGSSSEPKSSDKTHTCPPCPAPELLGGPSVFLFPPKPKDTLMISRTPEVTCVVVDVSHEDPEVKFNWYVDGVEVHNAKTKPREEQYNSTYRVVSVLTVLHQDWLNGKEYKCKVSNKALPAPIEKTISKAKGQPREPQVYTLPPSRDELTKNQVSLTCLVKGFYPSDIAVEWESNGQPENNYKTTPPVLDSDGSFFLYSKLTVDKSRWQQGNVFSCSVMHEALHNHYTQKSLSLSPGQMNSELSVLANSQVQLKESGPGSVAPSQSLSITCTVSGFSLTGYGVNWVRQPPGKGLEWLGMIWGDGSTDYNSALKSRLSITKDNSKSQVFLKMNSLQTDDTARYYCARDGYSNFHYYVMDYWGQGTSVTVSSGGGGSGGGGSGGGGSGGGGSDIVLTQSPASLAVSLGQRATISCRASESVEYYVTSLMQWYQQKPGQPPKLLISAASNVESGVPARFSGSGSGTDFSLNIHPVEEDDIAMYFCQQSRKVPWTFGGGTKLEIKRX

SEQ ID NO: 458 - DNA, 1599 bp, Artificial sequence
  Synthetic polynucleotide W0053 nucleotide sequence - full length sequence
aagcttgccgccatggaagcaccagcgcagcttctcttcctcctgctactctggctcccagataccaccggttcctcgagcgagcccaaatcttctgacaaaactcacacatgcccaccgtgcccagcacctgaactcctgggtggaccgtcagtcttcctcttccccccaaaacccaaggacaccctcatgatctcccggacccctgaggtcacatgcgtggtggtggacgtgagccacgaagaccctgaggtcaagttcaactggtacgtggacggcgtggaggtgcataatgccaagacaaagccgcgggaggagcagtacaacagcacgtaccgtgtggtcagcgtcctcaccgtcctgcaccaggactggctgaatggcaaggagtacaagtgcaaggtctccaacaaagccctcccagcccccatcgagaaaaccatctccaaagccaaagggcagccccgagaaccacaggtgtacaccctgcccccatcccgggatgagctgaccaagaaccaggtcagcctgacctgcctggtcaaaggcttctatccaagcgacatcgccgtggagtgggagagcaatgggcagccggagaacaactacaagaccacgcctcccgtgctggactccgacggctccttcttcctctacagcaagctcaccgtggacaagagcaggtggcagcaggggaacgtcttctcatgctccgtgatgcatgaggctctgcacaaccactacacgcagaagagcctctccctgtctccgggtcagaggcacaacaattcttccctgaatacaagaactcagaaagcacgtcattgtccgaattctcaggtgcagctgaaggagtcagggcctggcagcgtggcgccctcacagagcctgtccatcacatgcaccgtctcagggttctcattaaccggctatggtgtaaactgggttcgccagcctccaggaaagggtctggagtggctgggaatgatatggggtgatggaagcacagactataattcagctctcaaatccagactatcgatcaccaaggacaactccaagagccaagttttcttaaaaatgaacagtctgcaaactgatgacacagccagatactactgtgctcgagatggttatagtaactttcattactatgttatggactactggggtcaaggaacctcagtcaccgtctcctctgggggtggaggctctggtggcggtggatccggcggaggtgggtcgggtggcggcggatctgacattgtgctcacccaatctccagcttctttggctgtgtctctaggtcagagagccaccatctcctgcagagccagtgaaagtgttgaatattatgtcacaagtttaatgcagtggtaccaacagaaaccaggacagccacccaagctcctcatctctgctgctagcaacgtagaatctggggtccctgccaggtttagtggcagtgggtctgggacagactttagcctcaacatccatcctgtggaggaggatgatattgcaatgtatttctgtcagcaaagtaggaaggttccatggacgttcggtggaggcaccaagctggaaatcaaacgttaa

SEQ ID NO: 459 - protein, 529 aa, Artificial sequence
  Synthetic polypeptide W0053 amino acid sequence - full length sequence
  MISC_FEATURE (1)..(20): Leader sequence
  MISC_FEATURE (21)..(23): Junction
  MISC_FEATURE (24)..(38): Hinge region (Linker)
  MISC_FEATURE (39)..(254): CH2CH3 region
  MISC_FEATURE (255)..(275): PIMS linker
  MISC_FEATURE (276)..(300): Heavy region
  MISC_FEATURE (301)..(308): Heavy chain CDR sub-domain
  MISC_FEATURE (309)..(325): Heavy region
  MISC_FEATURE (326)..(332): Heavy chain CDR sub-domain
  MISC_FEATURE (333)..(370): Heavy region
  MISC_FEATURE (371)..(385): Heavy chain CDR sub-domain
  MISC_FEATURE (386)..(396): Heavy region
  MISC_FEATURE (397)..(416): Hinge region (Linker)
  MISC_FEATURE (417)..(442): Light region
  MISC_FEATURE (443)..(452): Light chain CDR sub-domain
  MISC_FEATURE (453)..(469): Light region
  MISC_FEATURE (470)..(472): Light chain CDR sub-domain
  MISC_FEATURE (473)..(508): Light region
  MISC_FEATURE (509)..(517): Light chain CDR sub-domain
  MISC_FEATURE (518)..(527): Light region
  MISC_FEATURE (529)..(529): Xaa is a stop codon
MEAPAQLLFLLLLWLPDTTGSSSEPKSSDKTHTCPPCPAPELLGGPSVFLFPPKPKDTLMISRTPEVTCVVVDVSHEDPEVKFNWYVDGVEVHNAKTKPREEQYNSTYRVVSVLTVLHQDWLNGKEYKCKVSNKALPAPIEKTISKAKGQPREPQVYTLPPSRDELTKNQVSLTCLVKGFYPSDIAVEWESNGQPENNYKTTPPVLDSDGSFFLYSKLTVDKSRWQQGNVFSCSVMHEALHNHYTQKSLSLSPGQRHNNSSLNTRTQKARHCPNSQVQLKESGPGSVAPSQSLSITCTVSGFSLTGYGVNWVRQPPGKGLEWLGMIWGDGSTDYNSALKSRLSITKDNSKSQVFLKMNSLQTDDTARYYCARDGYSNFHYYVMDYWGQGTSVTVSSGGGGSGGGGSGGGGSGGGGSDIVLTQSPASLAVSLGQRATISCRASESVEYYVTSLMQWYQQKPGQPPKLLISAASNVESGVPARFSGSGSGTDFSLNIHPVEEDDIAMYFCQQSRKVPWTFGGGTKLEIKRX

SEQ ID NO: 460 - DNA, 1599 bp, Artificial sequence
  Synthetic polynucleotide W0083 nucleotide sequence - full length sequence
aagcttgccgccatggaagcaccagcgcagcttctcttcctcctgctactctggctcccagataccaccggttcctcgagcgagcccaaatcttctgacaaaactcacacatgcccaccgtgcccagcacctgaactcctgggtggaccgtcagtcttcctcttccccccaaaacccaaggacaccctcatgatctcccggacccctgaggtcacatgcgtggtggtggacgtgagccacgaagaccctgaggtcaagttcaactggtacgtggacggcgtggaggtgcataatgccaagacaaagccgcgggaggagcagtacaacagcacgtaccgtgtggtcagcgtcctcaccgtcctgcaccaggactggctgaatggcaaggagtacaagtgcaaggtctccaacaaagccctcccagcccccatcgagaaaaccatctccaaagccaaagggcagccccgagaaccacaggtgtacaccctgcccccatcccgggatgagctgaccaagaaccaggtcagcctgacctgcctggtcaaaggcttctatccaagcgacatcgccgtggagtgggagagcaatgggcagccggagaacaactacaagaccacgcctcccgtgctggactccgacggctccttcttcctctacagcaagctcaccgtggacaagagcaggtggcagcaggggaacgtcttctcatgctccgtgatgcatgaggctctgcacaaccactacacgcagaagagcctctccctgtctccgggtcagaggcacaacaattcttccctgaatacaagaactcagaaagcacgtcattctccgaattctcaggtgcagctgaaggagtcagggcctggcagcgtggcgccctcacagagcctgtccatcacatgcaccgtctcagggttctcattaaccggctatggtgtaaactgggttcgccagcctccaggaaagggtctggagtggctgggaatgatatggggtgatggaagcacagactataattcagctctcaaatccagactatcgatcaccaaggacaactccaagagccaagttttcttaaaaatgaacagtctgcaaactgatgacacagccagatactactgtgctcgagatggttatagtaactttcattactatgttatggactactggggtcaaggaacctcagtcaccgtctcctctgggggtggaggctctggtggcggtggatccggcggaggtgggtcgggtggcggcggatctgacattgtgctcacccaatctccagcttctttggctgtgtctctaggtcagagagccaccatctcctgcagagccagtgaaagtgttgaatattatgtcacaagtttaatgcagtggtaccaacagaaaccaggacagccacccaagctcctcatctctgctgctagcaacgtagaatctggggtccctgccaggtttagtggcagtgggtctgggacagactttagcctcaacatccatcctgtggaggaggatgatattgcaatgtatttctgtcagcaaagtaggaaggttccatggacgttcggtggaggcaccaagctggaaatcaaacgttaa

SEQ ID NO: 461 - protein, 529 aa, Artificial sequence
  Synthetic polypeptide W0083 amino acid sequence - full length sequence
  MISC_FEATURE (1)..(20): Leader sequence
  MISC_FEATURE (21)..(23): Junction
  MISC_FEATURE (24)..(38): Hinge region (Linker)
  MISC_FEATURE (39)..(254): CH2CH3 region
  MISC_FEATURE (255)..(275): PIMS linker
  MISC_FEATURE (276)..(300): Heavy region
  MISC_FEATURE (301)..(308): Heavy chain CDR sub-domain
  MISC_FEATURE (309)..(325): Heavy region
  MISC_FEATURE (326)..(332): Heavy chain CDR sub-domain
  MISC_FEATURE (333)..(370): Heavy region
  MISC_FEATURE (371)..(385): Heavy chain CDR sub-domain
  MISC_FEATURE (386)..(396): Heavy region
  MISC_FEATURE (397)..(416): Hinge region (Linker)
  MISC_FEATURE (417)..(442): Light region
  MISC_FEATURE (443)..(452): Light chain CDR sub-domain
  MISC_FEATURE (453)..(469): Light region
  MISC_FEATURE (470)..(472): Light chain CDR sub-domain
  MISC_FEATURE (473)..(508): Light region
  MISC_FEATURE (509)..(517): Light chain CDR sub-domain
  MISC_FEATURE (518)..(527): Light region
  MISC_FEATURE (529)..(529): Xaa is a stop codon
MEAPAQLLFLLLLWLPDTTGSSSEPKSSDKTHTCPPCPAPELLGGPSVFLFPPKPKDTLMISRTPEVTCVVVDVSHEDPEVKFNWYVDGVEVHNAKTKPREEQYNSTYRVVSVLTVLHQDWLNGKEYKCKVSNKALPAPIEKTISKAKGQPREPQVYTLPPSRDELTKNQVSLTCLVKGFYPSDIAVEWESNGQPENNYKTTPPVLDSDGSFFLYSKLTVDKSRWQQGNVFSCSVMHEALHNHYTQKSLSLSPGQRHNNSSLNTRTQKARHSPNSQVQLKESGPGSVAPSQSLSITCTVSGFSLTGYGVNWVRQPPGKGLEWLGMIWGDGSTDYNSALKSRLSITKDNSKSQVFLKMNSLQTDDTARYYCARDGYSNFHYYVMDYWGQGTSVTVSSGGGGSGGGGSGGGGSGGGGSDIVLTQSPASLAVSLGQRATISCRASESVEYYVTSLMQWYQQKPGQPPKLLISAASNVESGVPARFSGSGSGTDFSLNIHPVEEDDIAMYFCQQSRKVPWTFGGGTKLEIKRX

SEQ ID NO: 462 - DNA, 318 bp, Artificial sequence
  Synthetic polynucleotide F3.3 Vk nt seq
gaaattgagctcacccagtctccagcaatcatgtctgtatttccaggggagaaggtcaccatgacctgcagtgccagctcaattgtacgttatatgtattggttccagcagaagccaggatcctcccccagactcctgatttatgacacatccagcctgtcttccggagtccctgttcgcttcagtggcagtgggtctgggacctcctattctctcacaatcagccgaatggaggctgtagatgctgccacttatttctgccagcagtggagtagttacccactcacgttcggtggtgggaccaagctggaaataaaa

SEQ ID NO: 463 - protein, 106 aa, Artificial sequence
  Synthetic polypeptide F3.3 Vk aa seq
EIELTQSPAIMSVFPGEKVTMTCSASSIVRYMYWFQQKPGSSPRLLIYDTSSLSSGVPVRFSGSGSGTSYSLTISRMEAVDAATYFCQQWSSYPLTFGGGTKLEIK

SEQ ID NO: 464 - DNA, 354 bp, Artificial sequence
  Synthetic polynucleotide F3.3 Vh nt seq
gaggtgcagctggaggaatctggaggaggcttggtgcaacctggaggatccatgaaactctcctgtgttgcctctggattcactttcagtaattcctggatgaactgggtccgccagtctccagaaaaggggcttgaatgggttgctgaaattagattgaaatctaataattatgcaacacgttatgcggagtctgtgaaagggaggttcaccatctcaagagatgattccaaaagtagtgtctacctgcaaatgaacaacttaagatctgaagacactgccatttattactgtacccccttatcttactcctttgactactggggccaagggaccacggtcaccgtctcgaca

SEQ ID NO: 465 - protein, 118 aa, Artificial sequence
  Synthetic polypeptide F3.3 Vh aa seq
EVQLEESGGGLVQPGGSMKLSCVASGFTFSNSWMNWVRQSPEKGLEWVAEIRLKSNNYATRYAESVKGRFTISRDDSKSSVYLQMNNLRSEDTAIYYCTPLSYSFDYWGQGTTVTVST

SEQ ID NO: 466 - protein, 100 aa, Artificial sequence
  Synthetic polypeptide IGHV3-73
EVQLVESGGGLVQPGGSLKLSCAASGFTFSGSAMHWVRQASGKGLEWVGRIRSKANSYATAYAASVKGRFTISRDDSKNTAYLQMNSLKTEDTAVYYCTR

SEQ ID NO: 467 - DNA, 51 bp, Artificial sequence
  Synthetic polynucleotide F3VHG4S1Bamf
ggtggatccggtggcggcggcggatctgaggtgcagctggaggaatctgga

SEQ ID NO: 468 - DNA, 50 bp, Artificial sequence
  Synthetic polynucleotide F3VHf1
ggtgcagctggaggaatctggaggaggcttggtgcaacctggaggatcca

SEQ ID NO: 469 - DNA, 51 bp, Artificial sequence
  Synthetic polynucleotide F3VHf2
ttggtgcaacctggaggatccatgaaactctcctgtgttgcctctggattc

SEQ ID NO: 470 - DNA, 52 bp, Artificial sequence
  Synthetic polynucleotide F3VHf3
tctcctgtgttgcctctggattcactttcagtaattcctggatgaactgggt

SEQ ID NO: 471 - DNA, 53 bp, Artificial sequence
  Synthetic polynucleotide F3VHf4
gtaattcctggatgaactgggtccgccagtctccagaaaaggggcttgaatgg

SEQ ID NO: 472 - DNA, 52 bp, Artificial sequence
  Synthetic polynucleotide F3VHf5
ctccagaaaaggggcttgaatgggttgctgaaattagattgaaatctaataa

SEQ ID NO: 473 - DNA, 50 bp, Artificial sequence
  Synthetic polynucleotide F3VHf6
gaaattagattgaaatctaataattatgcaacacgttatgcggagtctgt

SEQ ID NO: 474 - DNA, 50 bp, Artificial sequence
  Synthetic polynucleotide F3VHr6
tctcttgagatggtgaacctccctttcacagactccgcataacgtgttgc

SEQ ID NO: 475 - DNA, 50 bp, Artificial sequence
  Synthetic polynucleotide F3VHr7
ttgcaggtagacactacttttggaatcatctcttgagatggtgaacctcc

SEQ ID NO: 476 - DNA, 50 bp, Artificial sequence
  Synthetic polynucleotide F3VHr8
agtgtcttcagatcttaagttgttcatttgcaggtagacactacttttgg

SEQ ID NO: 477 - DNA, 50 bp, Artificial sequence
  Synthetic polynucleotide F3VHr9
agataagggggtacagtaataaatggcagtgtcttcagatcttaagttgt

SEQ ID NO: 478 - DNA, 50 bp, Artificial sequence
  Synthetic polynucleotide F3VHr10
tcccttggccccagtagtcaaaggagtaagataagggggtacagtaataa

SEQ ID NO: 479 - DNA, 53 bp, Artificial sequence
  Synthetic polynucleotide F3VHr11Bcl
gctcctgatcagtcgagacggtgaccgtggtcccttggccccagtagtcaaag

SEQ ID NO: 480 - DNA, 1557 bp, Artificial sequence
  Synthetic polynucleotide W0029 (13bp - 1569bp, direct)
atggaagcaccagcgcagcttctcttcctcctgctactctggctcccagataccaccggttcctcgagcgagcccaaatcttctgacaaaactcacacatgcccaccgtgcccagcacctgaactcctgggtggaccgtcagtcttcctcttccccccaaaacccaaggacaccctcatgatctcccggacccctgaggtcacatgcgtggtggtggacgtgagccacgaagaccctgaggtcaagttcaactggtacgtggacggcgtggaggtgcataatgccaagacaaagccgcgggaggagcagtacaacagcacgtaccgtgtggtcagcgtcctcaccgtcctgcaccaggactggctgaatggcaaggagtacaagtgcaaggtctccaacaaagccctcccagcccccatcgagaaaaccatctccaaagccaaagggcagccccgagaaccacaggtgtacaccctgcccccatcccgggatgagctgaccaagaaccaggtcagcctgacctgcctggtcaaaggcttctatccaagcgacatcgccgtggagtgggagagcaatgggcagccggagaacaactacaagaccacgcctcccgtgctggactccgacggctccttcttcctctacagcaagctcaccgtggacaagagcaggtggcagcaggggaacgtcttctcatgctccgtgatgcatgaggctctgcacaaccactacacgcagaagagcctctccctgtctccgggtaaggggtgtccaccttgtccgaattctgaggtgcagctggtgcagtctggagcagaggtgaaaaagcccggagagtctctgaagatttcctgtaagggatctggatacagctttaccagctactggatgaactgggtgcgccagatgcccgggaaaggcctggagtggatggggcagatttggcctggagatggtgatactaactacaatggaaagttcaagggccaggtcactatctcagccgacaagtccatcagcaccgcctacctgcaatggagcagcctgaaggcctcggacaccgccatgtattactgtgcacgcagagagactacgacggtaggccgttattactatgctatggactactggggtcagggcaccctggtcactgtctcctctggtggcggtagctcgggcggtggtgggtcgggtggcggcggatcaggaggaggcgggagtgacattgtgctgacccaatctccagcttctttggctgtgtctctagggcagagggccaccatctcctgcaaggccagccaaagtgttgattatgatggtgatagttatttgaactggtaccaacagattccaggacagccacccaaactcctcatctatgatgcatccaatctagtttctgggatcccacccaggtttagtggcagtgggtctgggacagacttcaccctcaacatccatcctgtggagaaggtggatgctgcaacctatcactgtcagcaaagtactgaggatccgtggacgttcggtggaggcaccaagctggaaatcaaatga

SEQ ID NO: 481 - protein, 519 aa, Artificial sequence
  Synthetic polypeptide W0029_prot (1aa - 519aa)
  MISC_FEATURE (1)..(20): Leader sequence
  MISC_FEATURE (21)..(23): Junction
  MISC_FEATURE (24)..(38): Hinge region (Linker)
  MISC_FEATURE (39)..(255): CH2CH3 region
  MISC_FEATURE (256)..(263): PIMS linker
  MISC_FEATURE (264)..(293): Heavy region
  MISC_FEATURE (294)..(298): Heavy chain CDR sub-domain
  MISC_FEATURE (299)..(312): Heavy region
  MISC_FEATURE (313)..(329): Heavy chain CDR sub-domain
  MISC_FEATURE (330)..(361): Heavy region
  MISC_FEATURE (362)..(376): Heavy chain CDR sub-domain
  MISC_FEATURE (377)..(387): Heavy region
  MISC_FEATURE (388)..(407): Hinge region (Linker)
  MISC_FEATURE (431)..(430): Light region
  MISC_FEATURE (431)..(445): Light chain CDR sub-domain
  MISC_FEATURE (446)..(460): Light region
  MISC_FEATURE (461)..(467): Light chain CDR sub-domain
  MISC_FEATURE (468)..(499): Light region
  MISC_FEATURE (500)..(508): Light chain CDR sub-domain
  MISC_FEATURE (509)..(518): Light region
  MISC_FEATURE (519)..(519): Xaa is a stop codon
MEAPAQLLFLLLLWLPDTTGSSSEPKSSDKTHTCPPCPAPELLGGPSVFLFPPKPKDTLMISRTPEVTCVVVDVSHEDPEVKFNWYVDGVEVHNAKTKPREEQYNSTYRVVSVLTVLHQDWLNGKEYKCKVSNKALPAPIEKTISKAKGQPREPQVYTLPPSRDELTKNQVSLTCLVKGFYPSDIAVEWESNGQPENNYKTTPPVLDSDGSFFLYSKLTVDKSRWQQGNVFSCSVMHEALHNHYTQKSLSLSPGKGCPPCPNSEVQLVQSGAEVKKPGESLKISCKGSGYSFTSYWMNWVRQMPGKGLEWMGQIWPGDGDTNYNGKFKGQVTISADKSISTAYLQWSSLKASDTAMYYCARRETTTVGRYYYAMDYWGQGTLVTVSSGGGSSGGGGSGGGGSGGGGSDIVLTQSPASLAVSLGQRATISCKASQSVDYDGDSYLNWYQQIPGQPPKLLIYDASNLVSGIPPRFSGSGSGTDFTLNIHPVEKVDAATYHCQQSTEDPWTFGGGTKLEIKX

SEQ ID NO: 482 - DNA, 1545 bp, Artificial sequence
  Synthetic polynucleotide W0030 (13bp - 1557bp, direct)
atggaagcaccagcgcagcttctcttcctcctgctactctggctcccagataccaccggttcctcgagcgagcccaaatcttctgacaaaactcacacatgcccaccgtgcccagcacctgaactcctgggtggaccgtcagtcttcctcttccccccaaaacccaaggacaccctcatgatctcccggacccctgaggtcacatgcgtggtggtggacgtgagccacgaagaccctgaggtcaagttcaactggtacgtggacggcgtggaggtgcataatgccaagacaaagccgcgggaggagcagtacaacagcacgtaccgtgtggtcagcgtcctcaccgtcctgcaccaggactggctgaatggcaaggagtacaagtgcaaggtctccaacaaagccctcccagcccccatcgagaaaaccatctccaaagccaaagggcagccccgagaaccacaggtgtacaccctgcccccatcccgggatgagctgaccaagaaccaggtcagcctgacctgcctggtcaaaggcttctatccaagcgacatcgccgtggagtgggagagcaatgggcagccggagaacaactacaagaccacgcctcccgtgctggactccgacggctccttcttcctctacagcaagctcaccgtggacaagagcaggtggcagcaggggaacgtcttctcatgctccgtgatgcatgaggctctgcacaaccactacacgcagaagagcctctccctgtctccgggtaaggggtgtccaccttgtccgaattctcaggttcagctgcagcagtctggggctgagctggtgaggcctgggtcctcagtgaagatttcctgcaaggcttctggctatgcattcagtagctactggatgaactgggtgaagcagaggcctggacagggtcttgagtggattggacagatttggcctggagatggtgatactaactacaatggaaagttcaagggtaaagccactctgactgcagacgaatcctccagcacagcctacatgcaactcagcagcctagcatctgaggactctgcggtctatttctgtgcaagacgggagactacgacggtaggccgttattactatgctatggactactggggtcaaggaacctcagtcaccgtctcctctggtggcggtggctcgggcggtggtgggtcgggtggcggcggagctagcgacattgtgctgacccaatctccagcttctttggctgtgtctctagggcagagggccaccatctcctgcaaggccagccaaagtgttgattatgatggtgatagttatttgaactggtaccaacagattccaggacagccacccaaactcctcatctatgatgcatccaatctagtttctgggatcccacccaggtttagtggcagtgggtctgggacagacttcaccctcaacatccatcctgtggagaaggtggatgctgcaacctatcactgtcagcaaagtactgaggatccgtggacgttcggtggaggcaccaagctggaaatcaaatga

SEQ ID NO: 483 - protein, 515 aa, Artificial sequence
  Synthetic polypeptide W0030_prot (1aa - 515aa)
  MISC_FEATURE (1)..(20): Leader sequence
  MISC_FEATURE (21)..(23): Junction
  MISC_FEATURE (24)..(38): Hinge region (Linker)
  MISC_FEATURE (39)..(255): CH2CH3 region
  MISC_FEATURE (256)..(263): PIMS linker
  MISC_FEATURE (264)..(293): Heavy region
  MISC_FEATURE (294)..(298): Heavy chain CDR sub-domain
  MISC_FEATURE (299)..(312): Heavy region
  MISC_FEATURE (313)..(329): Heavy chain CDR sub-domain
  MISC_FEATURE (330)..(361): Heavy region
  MISC_FEATURE (362)..(376): Heavy chain CDR sub-domain
  MISC_FEATURE (377)..(387): Heavy region
  MISC_FEATURE (388)..(403): Hinge region (Linker)
  MISC_FEATURE (404)..(426): Light region
  MISC_FEATURE (427)..(441): Light chain CDR sub-domain
  MISC_FEATURE (442)..(456): Light region
  MISC_FEATURE (457)..(463): Light chain CDR sub-domain
  MISC_FEATURE (464)..(495): Light region
  MISC_FEATURE (496)..(504): Light chain CDR sub-domain
  MISC_FEATURE (505)..(514): Light region
  MISC_FEATURE (515)..(515): Xaa is a stop codon
MEAPAQLLFLLLLWLPDTTGSSSEPKSSDKTHTCPPCPAPELLGGPSVFLFPPKPKDTLMISRTPEVTCVVVDVSHEDPEVKFNWYVDGVEVHNAKTKPREEQYNSTYRVVSVLTVLHQDWLNGKEYKCKVSNKALPAPIEKTISKAKGQPREPQVYTLPPSRDELTKNQVSLTCLVKGFYPSDIAVEWESNGQPENNYKTTPPVLDSDGSFFLYSKLTVDKSRWQQGNVFSCSVMHEALHNHYTQKSLSLSPGKGCPPCPNSQVQLQQSGAELVRPGSSVKISCKASGYAFSSYWMNWVKQRPGQGLEWIGQIWPGDGDTNYNGKFKGKATLTADESSSTAYMQLSSLASEDSAVYFCARRETTTVGRYYYAMDYWGQGTSVTVSSGGGGSGGGGSGGGGASDIVLTQSPASLAVSLGQRATISCKASQSVDYDGDSYLNWYQQIPGQPPKLLIYDASNLVSGIPPRFSGSGSGTDFTLNIHPVEKVDAATYHCQQSTEDPWTFGGGTKLEIKX

SEQ ID NO: 484 - DNA, 1551 bp, Artificial sequence
  Synthetic polynucleotide W0031 (13bp - 1563bp, direct)
atggaagcaccagcgcagcttctcttcctcctgctactctggctcccagataccaccggttcctcgagcgagcccaaatcttctgacaaaactcacacatgcccaccgtgcccagcacctgaactcctgggtggaccgtcagtcttcctcttccccccaaaacccaaggacaccctcatgatctcccggacccctgaggtcacatgcgtggtggtggacgtgagccacgaagaccctgaggtcaagttcaactggtacgtggacggcgtggaggtgcataatgccaagacaaagccgcgggaggagcagtacaacagcacgtaccgtgtggtcagcgtcctcaccgtcctgcaccaggactggctgaatggcaaggagtacaagtgcaaggtctccaacaaagccctcccagcccccatcgagaaaaccatctccaaagccaaagggcagccccgagaaccacaggtgtacaccctgcccccatcccgggatgagctgaccaagaaccaggtcagcctgacctgcctggtcaaaggcttctatccaagcgacatcgccgtggagtgggagagcaatgggcagccggagaacaactacaagaccacgcctcccgtgctggactccgacggctccttcttcctctacagcaagctcaccgtggacaagagcaggtggcagcaggggaacgtcttctcatgctccgtgatgcatgaggctctgcacaaccactacacgcagaagagcctctccctgtctccgggtaaggggtgtccaccttgtccgaattctgaggtccagctccagcagtctggacctgagctgataaagcctggtgcttcagtgaagatgtcctgcaaggcttctggatacacattcactagctatgttatgcactgggtgaagcagaagcctgggcagggccttgagtggattggatatattaatccttacaatgatggtactaagtacaatgagaagttcaaaggcaaggccacactgacttcagacaaatcctccagcacagcctacatggaactcagcagcctgacctctgaggactctgcggtctattactgtgcaagagggacttattactacggtagtagggtatttgactactggggccaaggcaccactctcacagtctcctcagggggtggaggctctggtggcggtggctctggcggaggagggtccggtggcggcggatccgatattgtgatgactcaggctgcaccctctatacctgtcactcctggagagtcagtatccatctcctgcaggtctagtaagagtctcctgaatagtaatggcaacacttacttgtattggttcctgcagaggccaggccagtctcctcagctcctgatatatcggatgtccaaccttgcctcaggagtcccagacaggttcagtggcagtgggtcaggaactgctttcacactgagaatcagtagagtggaggctgaggatgtgggtgtttattactgtatgcaacatcttgaatatccattcacattcggtgctgggaccaagctggagctgaaatga

SEQ ID NO: 485 - protein, 517 aa, Artificial sequence
  Synthetic polypeptide W0031_prot (1aa - 517aa)
  MISC_FEATURE (1)..(20): Leader sequence
  MISC_FEATURE (21)..(23): Junction
  MISC_FEATURE (24)..(38): Hinge region (Linker)
  MISC_FEATURE (39)..(255): CH2CH3 region
  MISC_FEATURE (256)..(263): PIMS linker
  MISC_FEATURE (264)..(293): Heavy region
  MISC_FEATURE (294)..(298): Heavy chain CDR sub-domain
  MISC_FEATURE (299)..(312): Heavy region
  MISC_FEATURE (313)..(329): Heavy chain CDR sub-domain
  MISC_FEATURE (330)..(361): Heavy region
  MISC_FEATURE (362)..(373): Heavy chain CDR sub-domain
  MISC_FEATURE (374)..(384): Heavy region
  MISC_FEATURE (385)..(404): Hinge region (Linker)
  MISC_FEATURE (405)..(427): Light region
  MISC_FEATURE (428)..(443): Light chain CDR sub-domain
  MISC_FEATURE (444)..(458): Light region
  MISC_FEATURE (459)..(465): Light chain CDR sub-domain
  MISC_FEATURE (466)..(497): Light region
  MISC_FEATURE (498)..(506): Light chain CDR sub-domain
  MISC_FEATURE (507)..(516): Light region
  MISC_FEATURE (517)..(517): Xaa is a stop codon
MEAPAQLLFLLLLWLPDTTGSSSEPKSSDKTHTCPPCPAPELLGGPSVFLFPPKPKDTLMISRTPEVTCVVVDVSHEDPEVKFNWYVDGVEVHNAKTKPREEQYNSTYRVVSVLTVLHQDWLNGKEYKCKVSNKALPAPIEKTISKAKGQPREPQVYTLPPSRDELTKNQVSLTCLVKGFYPSDIAVEWESNGQPENNYKTTPPVLDSDGSFFLYSKLTVDKSRWQQGNVFSCSVMHEALHNHYTQKSLSLSPGKGCPPCPNSEVQLQQSGPELIKPGASVKMSCKASGYTFTSYVMHWVKQKPGQGLEWIGYINPYNDGTKYNEKFKGKATLTSDKSSSTAYMELSSLTSEDSAVYYCARGTYYYGSRVFDYWGQGTTLTVSSGGGGSGGGGSGGGGSGGGGSDIVMTQAAPSIPVTPGESVSISCRSSKSLLNSNGNTYLYWFLQRPGQSPQLLIYRMSNLASGVPDRFSGSGSGTAFTLRISRVEAEDVGVYYCMQHLEYPFTFGAGTKLELKX

SEQ ID NO: 486 - DNA, 1530 bp, Artificial sequence
  Synthetic polynucleotide W0028 nucleotide sequence - full length sequence
atggaagcaccagcgcagcttctcttcctcctgctactctggctcccagataccaccggttcctcgagcgagcccaaatcttctgacaaaactcacacatgcccaccgtgcccagcacctgaactcctgggtggaccgtcagtcttcctcttccccccaaaacccaaggacaccctcatgatctcccggacccctgaggtcacatgcgtggtggtggacgtgagccacgaagaccctgaggtcaagttcaactggtacgtggacggcgtggaggtgcataatgccaagacaaagccgcgggaggagcagtacaacagcacgtaccgtgtggtcagcgtcctcaccgtcctgcaccaggactggctgaatggcaaggagtacaagtgcaaggtctccaacaaagccctcccagcccccatcgagaaaaccatctccaaagccaaagggcagccccgagaaccacaggtgtacaccctgcccccatcccgggatgagctgaccaagaaccaggtcagcctgacctgcctggtcaaaggcttctatccaagcgacatcgccgtggagtgggagagcaatgggcagccggagaacaactacaagaccacgcctcccgtgctggactccgacggctccttcttcctctacagcaagctcaccgtggacaagagcaggtggcagcaggggaacgtcttctcatgctccgtgatgcatgaggctctgcacaaccactacacgcagaagagcctctccctgtctccgggtaaggggtgtccaccttgtccgaattctgcggtccagctgcagcagtctggacctgagtcggaaaagcctggcgcttcagtgaagatttcctgcaaggcttctggttactcattcactggctacaatatgaactgggtgaagcagaataatggaaagagccttgagtggattggaaatattgatccttattatggtggtactacctacaaccggaagttcaagggcaaggccacattgactgtagacaaatcctccggcacagcctacatgcagctcaagagtctgacatctgaggactctgcagtctattactgtgcaagatcggtcggccctatggactactggggtcaaggaacctcagtcaccgtctcttctggtggcggtggctcgggcggtggtgggtcgggtggcggcggatcaggaggaggcgggagtgctagcgacatccagatgactcagtctccagcctccctatctgcatctgtgggagagactgtcaccatcacatgtcgaacaagtgaaaatgtttacagttatttggcttggtatcagcagaaacagggaaaatctcctcagctcctggtctcttttgcaaaaaccttagcagaaggtgtgccatcaaggttcagtggcagtggatcaggcacacagttttctctgaagatcagcagcctgcagcctgaagattctggaagttatttctgtcaacatcattccgataatccgtggacgttcggtggaggcaccgaactggagatcaaaggttga

SEQ ID NO: 487 - protein, 510 aa, Artificial Sequence
  Synthetic polypeptide W0028 amino acid sequence - full length sequence
  MISC_FEATURE (1)..(20): Leader sequence
  MISC_FEATURE (21)..(23): Junction
  MISC_FEATURE (24)..(38): Hinge region (linker)
  MISC_FEATURE (39)..(255): CH2CH3 region
  MISC_FEATURE (256)..(263): PIMS linker
  MISC_FEATURE (264)..(288): Heavy region
  MISC_FEATURE (289)..(296): Heavy chain CDR sub-domains
  MISC_FEATURE (297)..(313): Heavy region
  MISC_FEATURE (314)..(321): Heavy chain CDR sub-domains
  MISC_FEATURE (322)..(359): Heavy region
  MISC_FEATURE (360)..(368): Heavy chain CDR sub-domains
  MISC_FEATURE (369)..(379): Heavy region
  MISC_FEATURE (380)..(401): Hinge region (linker)
  MISC_FEATURE (402)..(427): Light region
  MISC_FEATURE (428)..(433): Light chain CDR sub-domains
  MISC_FEATURE (434)..(450): Light region
  MISC_FEATURE (451)..(453): Light chain CDR sub-domains
  MISC_FEATURE (454)..(489): Light region
  MISC_FEATURE (490)..(498): Light chain CDR sub-domains
  MISC_FEATURE (499)..(508): Light region
  MISC_FEATURE (510)..(510): Xaa is a stop codon
MEAPAQLLFLLLLWLPDTTGSSSEPKSSDKTHTCPPCPAPELLGGPSVFLFPPKPKDTLMISRTPEVTCVVVDVSHEDPEVKFNWYVDGVEVHNAKTKPREEQYNSTYRVVSVLTVLHQDWLNGKEYKCKVSNKALPAPIEKTISKAKGQPREPQVYTLPPSRDELTKNQVSLTCLVKGFYPSDIAVEWESNGQPENNYKTTPPVLDSDGSFFLYSKLTVDKSRWQQGNVFSCSVMHEALHNHYTQKSLSLSPGKGCPPCPNSAVQLQQSGPESEKPGASVKISCKASGYSFTGYNMNWVKQNNGKSLEWIGNIDPYYGGTTYNRKFKGKATLTVDKSSGTAYMQLKSLTSEDSAVYYCARSVGPMDYWGQGTSVTVSSGGGGSGGGGSGGGGSGGGGSASDIQMTQSPASLSASVGETVTITCRTSENVYSYLAWYQQKQGKSPQLLVSFAKTLAEGVPSRFSGSGSGTQFSLKISSLQPEDSGSYFCQHHSDNPWTFGGGTELEIKGX

SEQ ID NO: 488 - DNA, 1546 bp, Artificial sequence
  Synthetic polynucleotide W0011 with H7
aagcttgccgccatggaagcaccagcgcagcttctcttcctcctgctactctggctcccagataccaccggttcctcgagcgagcccaaatcttctgacaaaactcacacatgcccaccgtgcccagcacctgaactcctgggtggaccgtcagtcttcctcttccccccaaaacccaaggacaccctcatgatctcccggacccctgaggtcacatgcgtggtggtggacgtgagccacgaagaccctgaggtcaagttcaactggtacgtggacggcgtggaggtgcataatgccaagacaaagccgcgggaggagcagtacaacagcacgtaccgtgtggtcagcgtcctcaccgtcctgcaccaggactggctgaatggcaaggagtacaagtgcaaggtctccaacaaagccctcccagcccccatcgagaaaaccatctccaaagccaaagggcagccccgagaaccacaggtgtacaccctgcccccatcccgggatgagctgaccaagaaccaggtcagcctgacctgcctggtcaaaggcttctatccaagcgacatcgccgtggagtgggagagcaatgggcagccggagaacaactacaagaccacgcctcccgtgctggactccgacggctccttcttcctctacagcaagctcaccgtggacaagagcaggtggcagcaggggaacgtcttctcatgctccgtgatgcatgaggctctgcacaaccactacacgcagaagagcctctccctgtctccgggtaaggggtgtccaccttgtccgaattctcaggtgcagctggtgcagtctggtgctgagagcaagaagcctggggcctcagtgaaggtttcctgcaaggccagcggatacaccttcaccagctacaatatgcactgggtgcgacaggcgcctggacaagggctagagtggatgggagctatctatcctggaaatggtgatacatcctacaatcagaagttcaagggcagggtcaccatgaccagagacacgtccacgagcacagtctacatggagctgagcagcctgagatctgaggacacggccgtgtattactgtgcccgaagctactatagtaactcttactggtacttcgatctctggggccgcggcaccctggtcactgtctcctcggggggcggtggatcgggcggtggtggatctggaggaggtgggtctgctagcgaaattgtgttgacacagtctccagccaccctgtctttgtctccaggtgaaagagccaccctctcctgcagggccagttccagtgttagctacattgtttggtaccaacagaaacctggccaggcacctaggctcctcatctatgccccatccaacctggcttctggaataccagccaggttcagtggcagtggatccgggacagacttcactctcaccatcagcagtcttgagcctgaagattttgcagtttattactgtcagcagtggagttttaaccctcccacgttcggccaagggaccaaggtggaaatcaaagactgagtctaga

SEQ ID NO: 489 - DNA, 1547 bp, Artificial sequence
  Synthetic polynucleotide W0035 nt
agcttgccgccatggaagcaccagcgcagcttctcttcctcctgctactctggctcccagataccaccggttcctcgagcgagcccaaatcttctgacaaaactcacacatgcccaccgtgcccagcacctgaactcctgggtggaccgtcagtcttcctcttccccccaaaacccaaggacaccctcatgatctcccggacccctgaggtcacatgcgtggtggtggacgtgagccacgaagaccctgaggtcaagttcaactggtacgtggacggcgtggaggtgcataatgccaagacaaagccgcgggaggagcagtacaacagcacgtaccgtgtggtcagcgtcctcaccgtcctgcaccaggactggctgaatggcaaggagtacaagtgcaaggtctccaacaaagccctcccagcccccatcgagaaaaccatctccaaagccaaagggcagccccgagaaccacaggtgtacaccctgcccccatcccgggatgagctgaccaagaaccaggtcagcctgacctgcctggtcaaaggcttctatccaagcgacatcgccgtggagtgggagagcaatgggcagccggagaacaactacaagaccacgcctcccgtgctggactccgacggctccttcttcctctacagcaagctcaccgtggacaagagcaggtggcagcaggggaacgtcttctcatgctccgtgatgcatgaggctctgcacaaccactacacgcagaagagcctctccctgtctccgggtaaggggtgtccaccttgtccgaattctgaaattgagctcacccagtctccagcaatcatgtctgtatttccaggggagaaggtcaccatgacctgcagtgccagctcaattgtacgttatatgtattggttccagcagaagccagggtcctcccccagactcctgatttatgacacatccagcctgtcttccggagtccctgttcgcttcagtggcagtgggtctgggacctcctattctctcacaatcagccgaatggaggctgtagatgctgccacttatttctgccagcagtggagtagttacccactcacgttcggtggtgggaccaagctggaaataaaagggggtggaggctctggtggcggtggctctggcggaggtggatccggtggcggcggcggatctgaggtgcagctggaggaatctggaggaggcttggtgcaacctggagggtccatgaaactctcctgtgttgcctctggattcactttcagtaattcctggatgaactgggtccgccagtctccagaaaaggggcttgaatgggttgctgaaattagattgaaatctaataattacgcaacacgttatgcggagtctgtgaaagggaggttcaccatctcaagagatgattccaaaagtagtgtctacctgcaaatgaacaacttaagatctgaagacactgccatttattactgtacccccttatcttactcctttgactactggggccaagggaccacggtcaccgtctcgacttgattttctaga

SEQ ID NO: 490 - protein, 508 aa, Artificial sequence
  Synthetic polypeptide WO035 aa (W zero zero 35)
  MISC_FEATURE (1)..(20): Leader sequence
  MISC_FEATURE (21)..(23): Junction
  MISC_FEATURE (24)..(38): Hinge region (Linker)
  MISC_FEATURE (39)..(254): CH2CH3 region
  MISC_FEATURE (255)..(263): PIMS linker
  MISC_FEATURE (264)..(289): Light region
  MISC_FEATURE (290)..(294): Light chain CDR sub-domain
  MISC_FEATURE (295)..(311): Light region
  MISC_FEATURE (312)..(314): Light chain CDR sub-domain
  MISC_FEATURE (315)..(350): Light region
  MISC_FEATURE (351)..(359): Light chain CDR sub-domain
  MISC_FEATURE (360)..(369): Light region
  MISC_FEATURE (370)..(390): Hinge region (linker)
  MISC_FEATURE (391)..(415): Heavy region
  MISC_FEATURE (416)..(423): Heavy chain CDR sub-domain
  MISC_FEATURE (424)..(440): Heavy region
  MISC_FEATURE (441)..(450): Heavy chain CDR sub-domain
  MISC_FEATURE (451)..(488): Heavy region
  MISC_FEATURE (489)..(497): Heavy chain CDR sub-domain
  MISC_FEATURE (498)..(508): Heavy region
MEAPAQLLFLLLLWLPDTTGSSSEPKSSDKTHTCPPCPAPELLGGPSVFLFPPKPKDTLMISRTPEVTCVVVDVSHEDPEVKFNWYVDGVEVHNAKTKPREEQYNSTYRVVSVLTVLHQDWLNGKEYKCKVSNKALPAPIEKTISKAKGQPREPQVYTLPPSRDELTKNQVSLTCLVKGFYPSDIAVEWESNGQPENNYKTTPPVLDSDGSFFLYSKLTVDKSRWQQGNVFSCSVMHEALHNHYTQKSLSLSPGKGCPPCPNSEIELTQSPAIMSVFPGEKVTMTCSASSIVRYMYWFQQKPGSSPRLLIYDTSSLSSGVPVRFSGSGSGTSYSLTISRMEAVDAATYFCQQWSSYPLTFGGGTKLEIKGGGGSGGGGSGGGGSGGGGGSEVQLEESGGGLVQPGGSMKLSCVASGFTFSNSWMNWVRQSPEKGLEWVAEIRLKSNNYATRYAESVKGRFTISRDDSKSSVYLQMNNLRSEDTAIYYCTPLSYSFDYWGQGTTVTVST

SEQ ID NO: 491 - DNA, 1584 bp, Artificial sequence
  Synthetic polynucleotide W0036 nt
aagcttgccgccatggaagcaccagcgcagcttctcttcctcctgctactctggctcccagataccaccggttcctcgagcgagcccaaatcttctgacaaaactcacacatgcccaccgtgcccagcacctgaactcctgggtggaccgtcagtcttcctcttccccccaaaacccaaggacaccctcatgatctcccggacccctgaggtcacatgcgtggtggtggacgtgagccacgaagaccctgaggtcaagttcaactggtacgtggacggcgtggaggtgcataatgccaagacaaagccgcgggaggagcagtacaacagcacgtaccgtgtggtcagcgtcctcaccgtcctgcaccaggactggctgaatggcaaggagtacaagtgcaaggtctccaacaaagccctcccagcccccatcgagaaaaccatctccaaagccaaagggcagccccgagaaccacaggtgtacaccctgcccccatcccgggatgagctgaccaagaaccaggtcagcctgacctgcctggtcaaaggcttctatccaagcgacatcgccgtggagtgggagagcaatgggcagccggagaacaactacaagaccacgcctcccgtgctggactccgacggctccttcttcctctacagcaagctcaccgtggacaagagcaggtggcagcaggggaacgtcttctcatgctccgtgatgcatgaggctctgcacaaccactacacgcagaagagcctctccctgtctccgggtcagaggcacaacaattcttccctgaatacaagaactcagaaagcacgtcattgtccgaattctgaaattgagctcacccagtctccagcaatcatgtctgtatttccaggggagaaggtcaccatgacctgcagtgccagctcaattgtacgttatatgtattggttccagcagaagccagggtcctcccccagactcctgatttatgacacatccagcctgtcttccggagtccctgttcgcttcagtggcagtgggtctgggacctcctattctctcacaatcagccgaatggaggctgtagatgctgccacttatttctgccagcagtggagtagttacccactcacgttcggtggtgggaccaagctggaaataaaagggggtggaggctctggtggcggtggctctggcggaggtggatccggtggcggcggcggatctgaggtgcagctggaggaatctggaggaggcttggtgcaacctggagggtccatgaaactctcctgtgttgcctctggattcactttcagtaattcctggatgaactgggtccgccagtctccagaaaaggggcttgaatgggttgctgaaattagattgaaatctaataattacgcaacacgttatgcggagtctgtgaaagggaggttcaccatctcaagagatgattccaaaagtagtgtctacctgcaaatgaacaacttaagatctgaagacactgccatttattactgtacccccttatcttactcctttgactactggggccaagggaccacggtcaccgtctcgacttgattttctaga

SEQ ID NO: 492 - protein, 520 aa, Artificial sequence
  Synthetic polypeptide W0036 aa
  MISC_FEATURE (1)..(20): Leader sequence
  MISC_FEATURE (21)..(23): Junction
  MISC_FEATURE (24)..(38): Hinge region (Linker)
  MISC_FEATURE (39)..(254): CH2CH3 region
  MISC_FEATURE (255)..(275): PIMS linker
  MISC_FEATURE (276)..(301): Light region
  MISC_FEATURE (302)..(306): Light chain CDR sub-domain
  MISC_FEATURE (307)..(323): Light region
  MISC_FEATURE (324)..(326): Light chain CDR sub-domain
  MISC_FEATURE (327)..(362): Light region
  MISC_FEATURE (363)..(371): Light chain CDR sub-domain
  MISC_FEATURE (372)..(381): Light region
  MISC_FEATURE (382)..(402): Hinge region (linker)
  MISC_FEATURE (403)..(427): Heavy region
  MISC_FEATURE (428)..(435): Heavy chain CDR sub-domain
  MISC_FEATURE (436)..(452): Heavy region
  MISC_FEATURE (453)..(462): Heavy chain CDR sub-domain
  MISC_FEATURE (463)..(500): Heavy region
  MISC_FEATURE (501)..(509): Heavy chain CDR sub-domain
  MISC_FEATURE (510)..(520): Heavy region
MEAPAQLLFLLLLWLPDTTGSSSEPKSSDKTHTCPPCPAPELLGGPSVFLFPPKPKDTLMISRTPEVTCVVVDVSHEDPEVKFNWYVDGVEVHNAKTKPREEQYNSTYRVVSVLTVLHQDWLNGKEYKCKVSNKALPAPIEKTISKAKGQPREPQVYTLPPSRDELTKNQVSLTCLVKGFYPSDIAVEWESNGQPENNYKTTPPVLDSDGSFFLYSKLTVDKSRWQQGNVFSCSVMHEALHNHYTQKSLSLSPGQRHNNSSLNTRTQKARHCPNSEIELTQSPAIMSVFPGEKVTMTCSASSIVRYMYWFQQKPGSSPRLLIYDTSSLSSGVPVRFSGSGSGTSYSLTISRMEAVDAATYFCQQWSSYPLTFGGGTKLEIKGGGGSGGGGSGGGGSGGGGGSEVQLEESGGGLVQPGGSMKLSCVASGFTFSNSWMNWVRQSPEKGLEWVAEIRLKSNNYATRYAESVKGRFTISRDDSKSSVYLQMNNLRSEDTAIYYCTPLSYSFDYWGQGTTVTVST

SEQ ID NO: 493 - DNA, 1584 bp, Artificial sequence
  Synthetic polynucleotide W0056 nt
aagcttgccgccatggaagcaccagcgcagcttctcttcctcctgctactctggctcccagataccaccggttcctcgagcgagcccaaatcttctgacaaaactcacacatgcccaccgtgcccagcacctgaactcctgggtggaccgtcagtcttcctcttccccccaaaacccaaggacaccctcatgatctcccggacccctgaggtcacatgcgtggtggtggacgtgagccacgaagaccctgaggtcaagttcaactggtacgtggacggcgtggaggtgcataatgccaagacaaagccgcgggaggagcagtacaacagcacgtaccgtgtggtcagcgtcctcaccgtcctgcaccaggactggctgaatggcaaggagtacaagtgcaaggtctccaacaaagccctcccagcccccatcgagaaaaccatctccaaagccaaagggcagccccgagaaccacaggtgtacaccctgcccccatcccgggatgagctgaccaagaaccaggtcagcctgacctgcctggtcaaaggcttctatccaagcgacatcgccgtggagtgggagagcaatgggcagccggagaacaactacaagaccacgcctcccgtgctggactccgacggctccttcttcctctacagcaagctcaccgtggacaagagcaggtggcagcaggggaacgtcttctcatgctccgtgatgcatgaggctctgcacaaccactacacgcagaagagcctctccctgtctccgggtcagaggcacaacaattcttccctgaatacaagaactcagaaagcacgtcattctccgaattctgaaattgagctcacccagtctccagcaatcatgtctgtatttccaggggagaaggtcaccatgacctgcagtgccagctcaattgtacgttatatgtattggttccagcagaagccagggtcctcccccagactcctgatttatgacacatccagcctgtcttccggagtccctgttcgcttcagtggcagtgggtctgggacctcctattctctcacaatcagccgaatggaggctgtagatgctgccacttatttctgccagcagtggagtagttacccactcacgttcggtggtgggaccaagctggaaataaaagggggtggaggctctggtggcggtggctctggcggaggtggatccggtggcggcggcggatctgaggtgcagctggaggaatctggaggaggcttggtgcaacctggagggtccatgaaactctcctgtgttgcctctggattcactttcagtaattcctggatgaactgggtccgccagtctccagaaaaggggcttgaatgggttgctgaaattagattgaaatctaataattacgcaacacgttatgcggagtctgtgaaagggaggttcaccatctcaagagatgattccaaaagtagtgtctacctgcaaatgaacaacttaagatctgaagacactgccatttattactgtacccccttatcttactcctttgactactggggccaagggaccacggtcaccgtctcgacttgattttctaga

SEQ ID NO: 494 - protein, 520 aa, Artificial sequence
  Synthetic polypeptide W0056 aa
  MISC_FEATURE (1)..(20): Leader sequence
  MISC_FEATURE (21)..(23): Junction
  MISC_FEATURE (24)..(38): Hinge region (Linker)
  MISC_FEATURE (39)..(254): CH2CH3 region
  MISC_FEATURE (255)..(275): PIMS linker
  MISC_FEATURE (276)..(301): Light region
  MISC_FEATURE (302)..(306): Light chain CDR sub-domain
  MISC_FEATURE (307)..(323): Light region
  MISC_FEATURE (324)..(326): Light chain CDR sub-domain
  MISC_FEATURE (327)..(362): Light region
  MISC_FEATURE (363)..(371): Light chain CDR sub-domain
  MISC_FEATURE (372)..(381): Light region
  MISC_FEATURE (382)..(402): Hinge region (linker)
  MISC_FEATURE (403)..(427): Heavy region
  MISC_FEATURE (428)..(435): Heavy chain CDR sub-domain
  MISC_FEATURE (436)..(452): Heavy region
  MISC_FEATURE (453)..(462): Heavy chain CDR sub-domain
  MISC_FEATURE (463)..(500): Heavy region
  MISC_FEATURE (501)..(509): Heavy chain CDR sub-domain
  MISC_FEATURE (510)..(520): Heavy region
MEAPAQLLFLLLLWLPDTTGSSSEPKSSDKTHTCPPCPAPELLGGPSVFLFPPKPKDTLMISRTPEVTCVVVDVSHEDPEVKFNWYVDGVEVHNAKTKPREEQYNSTYRVVSVLTVLHQDWLNGKEYKCKVSNKALPAPIEKTISKAKGQPREPQVYTLPPSRDELTKNQVSLTCLVKGFYPSDIAVEWESNGQPENNYKTTPPVLDSDGSFFLYSKLTVDKSRWQQGNVFSCSVMHEALHNHYTQKSLSLSPGQRHNNSSLNTRTQKARHSPNSEIELTQSPAIMSVFPGEKVTMTCSASSIVRYMYWFQQKPGSSPRLLIYDTSSLSSGVPVRFSGSGSGTSYSLTISRMEAVDAATYFCQQWSSYPLTFGGGTKLEIKGGGGSGGGGSGGGGSGGGGGSEVQLEESGGGLVQPGGSMKLSCVASGFTFSNSWMNWVRQSPEKGLEWVAEIRLKSNNYATRYAESVKGRFTISRDDSKSSVYLQMNNLRSEDTAIYYCTPLSYSFDYWGQGTTVTVST

SEQ ID NO: 495 - DNA, 1887 bp, Artificial sequence
  Synthetic polynucleotide W0087 nt
aagcttgccgccatggaagcaccagcgcagcttctcttcctcctgctactctggctcccagataccaccggttcctcgagcgagcccaaatcttctgacaaaactcacacatgcccaccgtgcccagcacctgaactcctgggtggaccgtcagtcttcctcttccccccaaaacccaaggacaccctcatgatctcccggacccctgaggtcacatgcgtggtggtggacgtgagccacgaagaccctgaggtcaagttcaactggtacgtggacggcgtggaggtgcataatgccaagacaaagccgcgggaggagcagtacaacagcacgtaccgtgtggtcagcgtcctcaccgtcctgcaccaggactggctgaatggcaaggagtacaagtgcaaggtctccaacaaagccctcccagcccccatcgagaaaaccatctccaaagccaaagggcagccccgagaaccacaggtgtacaccctgcccccatcccgggatgagctgaccaagaaccaggtcagcctgacctgcctggtcaaaggcttctatccaagcgacatcgccgtggagtgggagagcaatgggcagccggagaacaactacaagaccacgcctcccgtgctggactccgacggctccttcttcctctacagcaagctcaccgtggacaagagcaggtggcagcaggggaacgtcttctcatgctccgtgatgcatgaggctctgcacaaccactacacgcagaagagcctctccctgtctccgggtcgtacgcgctatctgcaggtgtctcagcagctccagcagacgaacagggttctggaagtcactaacagcagcctgaggcagcagctccgcctcaagataacgcagctgggacagagtgcagaggatctgcaggggtccaggagagagctggcgcagagtcaggaagcactacaggtggaacagagggctcatcaggcggccgaagggcagctacaggcctgccaggcagacagacagaagacgaaggagaccttgcaaagtgaggagcaacagaggagggccttggagcagaagctgagcaacatggagaacagactgaagcccttcttcacatgcggctcagcagacacctgctgtccgaattctgaaattgagctcacccagtctccagcaatcatgtctgtatttccaggggagaaggtcaccatgacctgcagtgccagctcaattgtacgttatatgtattggttccagcagaagccagggtcctcccccagactcctgatttatgacacatccagcctgtcttccggagtccctgttcgcttcagtggcagtgggtctgggacctcctattctctcacaatcagccgaatggaggctgtagatgctgccacttatttctgccagcagtggagtagttacccactcacgttcggtggtgggaccaagctggaaataaaagggggtggaggctctggtggcggtggctctggcggaggtggatccggtggcggcggcggatctgaggtgcagctggaggaatctggaggaggcttggtgcaacctggagggtccatgaaactctcctgtgttgcctctggattcactttcagtaattcctggatgaactgggtccgccagtctccagaaaaggggcttgaatgggttgctgaaattagattgaaatctaataattacgcaacacgttatgcggagtctgtgaaagggaggttcaccatctcaagagatgattccaaaagtagtgtctacctgcaaatgaacaacttaagatctgaagacactgccatttattactgtacccccttatcttactcctttgactactggggccaagggaccacggtcaccgtctcgacttgattttctaga

SEQ ID NO: 496 - protein, 621 aa, Artificial sequence
  Synthetic polypeptide W0087 aa
  MISC_FEATURE (1)..(20): Leader sequence
  MISC_FEATURE (21)..(23): Junction
  MISC_FEATURE (24)..(38): Hinge region (Linker)
  MISC_FEATURE (39)..(254): CH2CH3 region
  MISC_FEATURE (255)..(376): PIMS linker
  MISC_FEATURE (377)..(402): Light region
  MISC_FEATURE (403)..(407): Light chain CDR sub-domain
  MISC_FEATURE (408)..(424): Light region
  MISC_FEATURE (425)..(427): Light chain CDR sub-domain
  MISC_FEATURE (428)..(463): Light region
  MISC_FEATURE (464)..(472): Light chain CDR sub-domain
  MISC_FEATURE (473)..(482): Light region
  MISC_FEATURE (483)..(503): Hinge region (linker)
  MISC_FEATURE (504)..(528): Heavy region
  MISC_FEATURE (529)..(536): Heavy chain CDR sub-domain
  MISC_FEATURE (537)..(553): Heavy region
  MISC_FEATURE (554)..(563): Heavy chain CDR sub-domain
  MISC_FEATURE (564)..(601): Heavy region
  MISC_FEATURE (602)..(610): Heavy chain CDR sub-domain
  MISC_FEATURE (611)..(621): Heavy region
MEAPAQLLFLLLLWLPDTTGSSSEPKSSDKTHTCPPCPAPELLGGPSVFLFPPKPKDTLMISRTPEVTCVVVDVSHEDPEVKFNWYVDGVEVHNAKTKPREEQYNSTYRVVSVLTVLHQDWLNGKEYKCKVSNKALPAPIEKTISKAKGQPREPQVYTLPPSRDELTKNQVSLTCLVKGFYPSDIAVEWESNGQPENNYKTTPPVLDSDGSFFLYSKLTVDKSRWQQGNVFSCSVMHEALHNHYTQKSLSLSPGRTRYLQVSQQLQQTNRVLEVTNSSLRQQLRLKITQLGQSAEDLQGSRRELAQSQEALQVEQRAHQAAEGQLQACQADRQKTKETLQSEEQQRRALEQKLSNMENRLKPFFTCGSADTCCPNSEIELTQSPAIMSVFPGEKVTMTCSASSIVRYMYWFQQKPGSSPRLLIYDTSSLSSGVPVRFSGSGSGTSYSLTISRMEAVDAATYFCQQWSSYPLTFGGGTKLEIKGGGGSGGGGSGGGGSGGGGGSEVQLEESGGGLVQPGGSMKLSCVASGFTFSNSWMNWVRQSPEKGLEWVAEIRLKSNNYATRYAESVKGRFTISRDDSKSSVYLQMNNLRSEDTAIYYCTPLSYSFDYWGQGTTVTVST

SEQ ID NO: 497 - DNA, 1512 bp, Artificial sequence
  Synthetic polynucleotide W0041 DNA sequence
atggaagcaccagcgcagcttctcttcctcctgctactctggctcccagataccaccggttcctcgagcgagcccaaatcttctgacaaaactcacacatgcccaccgtgcccagcacctgaactcctgggtggaccgtcagtcttcctcttccccccaaaacccaaggacaccctcatgatctcccggacccctgaggtcacatgcgtggtggtggacgtgagccacgaagaccctgaggtcaagttcaactggtacgtggacggcgtggaggtgcataatgccaagacaaagccgcgggaggagcagtacaacagcacgtaccgtgtggtcagcgtcctcaccgtcctgcaccaggactggctgaatggcaaggagtacaagtgcaaggtctccaacaaagccctcccagcccccatcgagaaaaccatctccaaagccaaagggcagccccgagaaccacaggtgtacaccctgcccccatcccgggatgagctgaccaagaaccaggtcagcctgacctgcctggtcaaaggcttctatccaagcgacatcgccgtggagtgggagagcaatgggcagccggagaacaactacaagaccacgcctcccgtgctggactccgacggctccttcttcctctacagcaagctcaccgtggacaagagcaggtggcagcaggggaacgtcttctcatgctccgtgatgcatgaggctctgcacaaccactacacgcagaagagcctctccctgtctccggggtgtccaccttgtccgaattctcaggtacagctgcagcagtcaggggctgaggtgaagaagcctgggtcctcggtgaaggtctcctgcaaggcttctggaggcaccatcagcaactatgctatcagttgggtgcggctggcccctggacaaggtcttgagtggatgggaagtatcgtccctcttcatgggacaacaaacttcgcacagaaattccagggcagagtcacgatcaccgcggacgagtccacgagcacatcctacatggaggtgaacgtcctgacatatgaagacacggcgatgtattattgtgcgtctctcaattggggctactggggccggggcaccctggtcaccgtctcgagtggaggcggcggttcaggcggaggtggctctggcggtggcggaagtgcacttaattttatgctgactcagccccactctgtgtcggagtctccggggaagacggtaaccatctcctgcaccggcagtagtggcagcattgccagcaactatgtgcagtggtaccagcagcgcccggacagtgcccccaccactgtgatctatgaggataatcgaagatcctctggagtccctgatcggttctctggctccatcgacagctcctccaactctgcctccctcagcatctctggactgaagactgaggacgaggctgactactactgtcagtcctatgatagtagcggtcatgtggtcttcggcggagggaccaagctgaccgtcctaggt

SEQ ID NO: 498 - protein, 504 aa, Artificial sequence
  Synthetic polypeptide W0041 Amino acid sequence
  MISC_FEATURE (1)..(20): Leader sequence
  MISC_FEATURE (21)..(23): Junction
  MISC_FEATURE (24)..(38): Hinge region (linker)
  MISC_FEATURE (39)..(254): CH2CH3 region
  MISC_FEATURE (255)..(261): PIMS linker
  MISC_FEATURE (262)..(286): Heavy region
  MISC_FEATURE (287)..(294): Heavy chain CDR sub-domains
  MISC_FEATURE (295)..(308): Heavy region
  MISC_FEATURE (309)..(319): Heavy chain CDR sub-domains
  MISC_FEATURE (320)..(357): Heavy region
  MISC_FEATURE (358)..(364): Heavy chain CDR sub-domains
  MISC_FEATURE (365)..(375): Heavy region
  MISC_FEATURE (376)..(392): Hinge region (linker)
  MISC_FEATURE (393)..(417): Light region
  MISC_FEATURE (418)..(425): Light chain CDR sub-domains
  MISC_FEATURE (426)..(439): Light region
  MISC_FEATURE (440)..(445): Light chain CDR sub-domains
  MISC_FEATURE (446)..(483): Light region
  MISC_FEATURE (484)..(493): Light chain CDR sub-domains
  MISC_FEATURE (494)..(504): Light region
MEAPAQLLFLLLLWLPDTTGSSSEPKSSDKTHTCPPCPAPELLGGPSVFLFPPKPKDTLMISRTPEVTCVVVDVSHEDPEVKFNWYVDGVEVHNAKTKPREEQYNSTYRVVSVLTVLHQDWLNGKEYKCKVSNKALPAPIEKTISKAKGQPREPQVYTLPPSRDELTKNQVSLTCLVKGFYPSDIAVEWESNGQPENNYKTTPPVLDSDGSFFLYSKLTVDKSRWQQGNVFSCSVMHEALHNHYTQKSLSLSPGCPPCPNSQVQLQQSGAEVKKPGSSVKVSCKASGGTISNYAISWVRLAPGQGLEWMGSIVPLHGTTNFAQKFQGRVTITADESTSTSYMEVNVLTYEDTAMYYCASLNWGYWGRGTLVTVSSGGGGSGGGGSGGGGSALNFMLTQPHSVSESPGKTVTISCTGSSGSIASNYVQWYQQRPDSAPTTVIYEDNRRSSGVPDRFSGSIDSSSNSASLSISGLKTEDEADYYCQSYDSSGHVVFGGGTKLTVLG

SEQ ID NO: 499 - DNA, 1554 bp, Artificial sequence
  Synthetic polynucleotide W0042 DNA sequence
atggaagcaccagcgcagcttctcttcctcctgctactctggctcccagataccaccggttcctcgagcgagcccaaatcttctgacaaaactcacacatgcccaccgtgcccagcacctgaactcctgggtggaccgtcagtcttcctcttccccccaaaacccaaggacaccctcatgatctcccggacccctgaggtcacatgcgtggtggtggacgtgagccacgaagaccctgaggtcaagttcaactggtacgtggacggcgtggaggtgcataatgccaagacaaagccgcgggaggagcagtacaacagcacgtaccgtgtggtcagcgtcctcaccgtcctgcaccaggactggctgaatggcaaggagtacaagtgcaaggtctccaacaaagccctcccagcccccatcgagaaaaccatctccaaagccaaagggcagccccgagaaccacaggtgtacaccctgcccccatcccgggatgagctgaccaagaaccaggtcagcctgacctgcctggtcaaaggcttctatccaagcgacatcgccgtggagtgggagagcaatgggcagccggagaacaactacaagaccacgcctcccgtgctggactccgacggctccttcttcctctacagcaagctcaccgtggacaagagcaggtggcagcaggggaacgtcttctcatgctccgtgatgcatgaggctctgcacaaccactacacgcagaagagcctctccctgtctccgggtcagaggcacaacaattcttccctgaatacaagaactcagaaagcacgtcattgtccgaattctcaggtacagctgcagcagtcaggggctgaggtgaagaagcctgggtcctcggtgaaggtctcctgcaaggcttctggaggcaccatcagcaactatgctatcagttgggtgcggctggcccctggacaaggtcttgagtggatgggaagtatcgtccctcttcatgggacaacaaacttcgcacagaaattccagggcagagtcacgatcaccgcggacgagtccacgagcacatcctacatggaggtgaacgtcctgacatatgaagacacggcgatgtattattgtgcgtctctcaattggggctactggggccggggcaccctggtcaccgtctcgagtggaggcggcggttcaggcggaggtggctctggcggtggcggaagtgcacttaattttatgctgactcagccccactctgtgtcggagtctccggggaagacggtaaccatctcctgcaccggcagtagtggcagcattgccagcaactatgtgcagtggtaccagcagcgcccggacagtgcccccaccactgtgatctatgaggataatcgaagatcctctggagtccctgatcggttctctggctccatcgacagctcctccaactctgcctccctcagcatctctggactgaagactgaggacgaggctgactactactgtcagtcctatgatagtagcggtcatgtggtcttcggcggagggaccaagctgaccgtcctaggt

SEQ ID NO: 500 - protein, 518 aa, Artificial sequence
  Synthetic polypeptide W0042 Amino acid sequence
  MISC_FEATURE (1)..(20): Leader sequence
  MISC_FEATURE (21)..(23): Junction
  MISC_FEATURE (23)..(38): Hinge region (linker)
  MISC_FEATURE (39)..(254): CH2CH3 region
  MISC_FEATURE (255)..(275): PIMS linker
  MISC_FEATURE (276)..(300): Heavy region
  MISC_FEATURE (301)..(308): Heavy chain CDR sub-domains
  MISC_FEATURE (309)..(322): Heavy region
  MISC_FEATURE (323)..(333): Heavy chain CDR sub-domains
  MISC_FEATURE (334)..(371): Heavy region
  MISC_FEATURE (372)..(378): Heavy chain CDR sub-domains
  MISC_FEATURE (379)..(389): Heavy region
  MISC_FEATURE (390)..(406): Hinge region (linker)
  MISC_FEATURE (407)..(431): Light region
  MISC_FEATURE (432)..(439): Light chain CDR sub-domains
  MISC_FEATURE (440)..(453): Light region
  MISC_FEATURE (454)..(459): Light chain CDR sub-domains
  MISC_FEATURE (460)..(497): Light region
  MISC_FEATURE (498)..(507): Light chain CDR sub-domains
  MISC_FEATURE (508)..(518): Light region
MEAPAQLLFLLLLWLPDTTGSSSEPKSSDKTHTCPPCPAPELLGGPSVFLFPPKPKDTLMISRTPEVTCVVVDVSHEDPEVKFNWYVDGVEVHNAKTKPREEQYNSTYRVVSVLTVLHQDWLNGKEYKCKVSNKALPAPIEKTISKAKGQPREPQVYTLPPSRDELTKNQVSLTCLVKGFYPSDIAVEWESNGQPENNYKTTPPVLDSDGSFFLYSKLTVDKSRWQQGNVFSCSVMHEALHNHYTQKSLSLSPGQRHNNSSLNTRTQKARHCPNSQVQLQQSGAEVKKPGSSVKVSCKASGGTISNYAISWVRLAPGQGLEWMGSIVPLHGTTNFAQKFQGRVTITADESTSTSYMEVNVLTYEDTAMYYCASLNWGYWGRGTLVTVSSGGGGSGGGGSGGGGSALNFMLTQPHSVSESPGKTVTISCTGSSGSIASNYVQWYQQRPDSAPTTVIYEDNRRSSGVPDRFSGSIDSSSNSASLSISGLKTEDEADYYCQSYDSSGHVVFGGGTKLTVLG

SEQ ID NO: 501 - DNA, 1536 bp, Artificial sequence
  Synthetic polynucleotide W0043 DNA sequence
atggaagcaccagcgcagcttctcttcctcctgctactctggctcccagataccaccggttcctcgagcgagcccaaatcttctgacaaaactcacacatgcccaccgtgcccagcacctgaactcctgggtggaccgtcagtcttcctcttccccccaaaacccaaggacaccctcatgatctcccggacccctgaggtcacatgcgtggtggtggacgtgagccacgaagaccctgaggtcaagttcaactggtacgtggacggcgtggaggtgcataatgccaagacaaagccgcgggaggagcagtacaacagcacgtaccgtgtggtcagcgtcctcaccgtcctgcaccaggactggctgaatggcaaggagtacaagtgcaaggtctccaacaaagccctcccagcccccatcgagaaaaccatctccaaagccaaagggcagccccgagaaccacaggtgtacaccctgcccccatcccgggatgagctgaccaagaaccaggtcagcctgacctgcctggtcaaaggcttctatccaagcgacatcgccgtggagtgggagagcaatgggcagccggagaacaactacaagaccacgcctcccgtgctggactccgacggctccttcttcctctacagcaagctcaccgtggacaagagcaggtggcagcaggggaacgtcttctcatgctccgtgatgcatgaggctctgcacaaccactacacgcagaagagcctctccctgtctccgggtctgtctgtgaaagctgacttcctcactccatccatcgggaattctcaggtacagctgcagcagtcaggggctgaggtgaagaagcctgggtcctcggtgaaggtctcctgcaaggcttctggaggcaccatcagcaactatgctatcagttgggtgcggctggcccctggacaaggtcttgagtggatgggaagtatcgtccctcttcatgggacaacaaacttcgcacagaaattccagggcagagtcacgatcaccgcggacgagtccacgagcacatcctacatggaggtgaacgtcctgacatatgaagacacggcgatgtattattgtgcgtctctcaattggggctactggggccggggcaccctggtcaccgtctcgagtggaggcggcggttcaggcggaggtggctctggcggtggcggaagtgcacttaattttatgctgactcagccccactctgtgtcggagtctccggggaagacggtaaccatctcctgcaccggcagtagtggcagcattgccagcaactatgtgcagtggtaccagcagcgcccggacagtgcccccaccactgtgatctatgaggataatcgaagatcctctggagtccctgatcggttctctggctccatcgacagctcctccaactctgcctccctcagcatctctggactgaagactgaggacgaggctgactactactgtcagtcctatgatagtagcggtcatgtggtcttcggcggagggaccaagctgaccgtcctaggt

SEQ ID NO: 502 - protein, 512 aa, Artificial sequence
  Synthetic polypeptide W0043 Amino acid sequence
  MISC_FEATURE (1)..(20): Leader sequence
  MISC_FEATURE (21)..(23): Junction
  MISC_FEATURE (24)..(38): Hinge region (linker)
  MISC_FEATURE (39)..(254): CH2CH3 region
  MISC_FEATURE (255)..(269): PIMS linker
  MISC_FEATURE (270)..(294): Heavy region
  MISC_FEATURE (295)..(302): Heavy chain CDR sub-domains
  MISC_FEATURE (303)..(316): Heavy region
  MISC_FEATURE (317)..(327): Heavy chain CDR sub-domains
  MISC_FEATURE (328)..(365): Heavy region
  MISC_FEATURE (366)..(372): Heavy chain CDR sub-domains
  MISC_FEATURE (373)..(383): Heavy region
  MISC_FEATURE (384)..(400): Hinge region (linker)
  MISC_FEATURE (401)..(425): Light region
  MISC_FEATURE (426)..(433): Light chain CDR sub-domains
  MISC_FEATURE (434)..(447): Light region
  MISC_FEATURE (448)..(453): Light chain CDR sub-domains
  MISC_FEATURE (454)..(491): Light region
  MISC_FEATURE (492)..(501): Light chain CDR sub-domains
  MISC_FEATURE (502)..(512): Light region
MEAPAQLLFLLLLWLPDTTGSSSEPKSSDKTHTCPPCPAPELLGGPSVFLFPPKPKDTLMISRTPEVTCVVVDVSHEDPEVKFNWYVDGVEVHNAKTKPREEQYNSTYRVVSVLTVLHQDWLNGKEYKCKVSNKALPAPIEKTISKAKGQPREPQVYTLPPSRDELTKNQVSLTCLVKGFYPSDIAVEWESNGQPENNYKTTPPVLDSDGSFFLYSKLTVDKSRWQQGNVFSCSVMHEALHNHYTQKSLSLSPGLSVKADFLTPSIGNSQVQLQQSGAEVKKPGSSVKVSCKASGGTISNYAISWVRLAPGQGLEWMGSIVPLHGTTNFAQKFQGRVTITADESTSTSYMEVNVLTYEDTAMYYCASLNWGYWGRGTLVTVSSGGGGSGGGGSGGGGSALNFMLTQPHSVSESPGKTVTISCTGSSGSIASNYVQWYQQRPDSAPTTVIYEDNRRSSGVPDRFSGSIDSSSNSASLSISGLKTEDEADYYCQSYDSSGHVVFGGGTKLTVLG

SEQ ID NO: 503 - DNA, 1527 bp, Artificial sequence
  Synthetic polynucleotide W0044 DNA sequence
atggaagcaccagcgcagcttctcttcctcctgctactctggctcccagataccaccggttcctcgagcgagcccaaatcttctgacaaaactcacacatgcccaccgtgcccagcacctgaactcctgggtggaccgtcagtcttcctcttccccccaaaacccaaggacaccctcatgatctcccggacccctgaggtcacatgcgtggtggtggacgtgagccacgaagaccctgaggtcaagttcaactggtacgtggacggcgtggaggtgcataatgccaagacaaagccgcgggaggagcagtacaacagcacgtaccgtgtggtcagcgtcctcaccgtcctgcaccaggactggctgaatggcaaggagtacaagtgcaaggtctccaacaaagccctcccagcccccatcgagaaaaccatctccaaagccaaagggcagccccgagaaccacaggtgtacaccctgcccccatcccgggatgagctgaccaagaaccaggtcagcctgacctgcctggtcaaaggcttctatccaagcgacatcgccgtggagtgggagagcaatgggcagccggagaacaactacaagaccacgcctcccgtgctggactccgacggctccttcttcctctacagcaagctcaccgtggacaagagcaggtggcagcaggggaacgtcttctcatgctccgtgatgcatgaggctctgcacaaccactacacgcagaagagcctctccctgtctccgggtcagatgaactccgagttgagcgtgctcgcgaattctcaggtacagctgcagcagtcaggggctgaggtgaagaagcctgggtcctcggtgaaggtctcctgcaaggcttctggaggcaccatcagcaactatgctatcagttgggtgcggctggcccctggacaaggtcttgagtggatgggaagtatcgtccctcttcatgggacaacaaacttcgcacagaaattccagggcagagtcacgatcaccgcggacgagtccacgagcacatcctacatggaggtgaacgtcctgacatatgaagacacggcgatgtattattgtgcgtctctcaattggggctactggggccggggcaccctggtcaccgtctcgagtggaggcggcggttcaggcggaggtggctctggcggtggcggaagtgcacttaattttatgctgactcagccccactctgtgtcggagtctccggggaagacggtaaccatctcctgcaccggcagtagtggcagcattgccagcaactatgtgcagtggtaccagcagcgcccggacagtgcccccaccactgtgatctatgaggataatcgaagatcctctggagtccctgatcggttctctggctccatcgacagctcctccaactctgcctccctcagcatctctggactgaagactgaggacgaggctgactactactgtcagtcctatgatagtagcggtcatgtggtcttcggcggagggaccaagctgaccgtcctaggt

SEQ ID NO: 504 - protein, 509 aa, Artificial sequence
  Synthetic polynucleotide W0044 Amino acid sequence
  MISC_FEATURE (1)..(20): Leader sequence
  MISC_FEATURE (21)..(23): Junction
  MISC_FEATURE (24)..(38): Hinge region (linker)
  MISC_FEATURE (39)..(254): CH2CH3 region
  MISC_FEATURE (255)..(266): PIMS linker
  MISC_FEATURE (267)..(291): Heavy region
  MISC_FEATURE (292)..(299): Heavy chain CDR sub-domains
  MISC_FEATURE (300)..(313): Heavy region
  MISC_FEATURE (314)..(324): Heavy chain CDR sub-domains
  MISC_FEATURE (325)..(362): Heavy region
  MISC_FEATURE (363)..(369): Heavy chain CDR sub-domains
  MISC_FEATURE (363)..(369): Heavy region
  MISC_FEATURE (370)..(380): Heavy region
  MISC_FEATURE (381)..(397): Hinge region (linker)
  MISC_FEATURE (398)..(422): Light region
  MISC_FEATURE (423)..(430): Light chain CDR sub-domains
  MISC_FEATURE (431)..(444): Light region
  MISC_FEATURE (445)..(450): Light chain CDR sub-domains
  MISC_FEATURE (451)..(488): Light region
  MISC_FEATURE (489)..(498): Light chain CDR sub-domains
  MISC_FEATURE (499)..(509): Light region
MEAPAQLLFLLLLWLPDTTGSSSEPKSSDKTHTCPPCPAPELLGGPSVFLFPPKPKDTLMISRTPEVTCVVVDVSHEDPEVKFNWYVDGVEVHNAKTKPREEQYNSTYRVVSVLTVLHQDWLNGKEYKCKVSNKALPAPIEKTISKAKGQPREPQVYTLPPSRDELTKNQVSLTCLVKGFYPSDIAVEWESNGQPENNYKTTPPVLDSDGSFFLYSKLTVDKSRWQQGNVFSCSVMHEALHNHYTQKSLSLSPGQMNSELSVLANSQVQLQQSGAEVKKPGSSVKVSCKASGGTISNYAISWVRLAPGQGLEWMGSIVPLHGTTNFAQKFQGRVTITADESTSTSYMEVNVLTYEDTAMYYCASLNWGYWGRGTLVTVSSGGGGSGGGGSGGGGSALNFMLTQPHSVSESPGKTVTISCTGSSGSIASNYVQWYQQRPDSAPTTVIYEDNRRSSGVPDRFSGSIDSSSNSASLSISGLKTEDEADYYCQSYDSSGHVVFGGGTKLTVLG

SEQ ID NO: 505 - DNA, 1554 bp, Artificial sequence
  Synthetic polynucleotide W0045 DNA sequence
atggaagcaccagcgcagcttctcttcctcctgctactctggctcccagataccaccggttcctcgagcgagcccaaatcttctgacaaaactcacacatgcccaccgtgcccagcacctgaactcctgggtggaccgtcagtcttcctcttccccccaaaacccaaggacaccctcatgatctcccggacccctgaggtcacatgcgtggtggtggacgtgagccacgaagaccctgaggtcaagttcaactggtacgtggacggcgtggaggtgcataatgccaagacaaagccgcgggaggagcagtacaacagcacgtaccgtgtggtcagcgtcctcaccgtcctgcaccaggactggctgaatggcaaggagtacaagtgcaaggtctccaacaaagccctcccagcccccatcgagaaaaccatctccaaagccaaagggcagccccgagaaccacaggtgtacaccctgcccccatcccgggatgagctgaccaagaaccaggtcagcctgacctgcctggtcaaaggcttctatccaagcgacatcgccgtggagtgggagagcaatgggcagccggagaacaactacaagaccacgcctcccgtgctggactccgacggctccttcttcctctacagcaagctcaccgtggacaagagcaggtggcagcaggggaacgtcttctcatgctccgtgatgcatgaggctctgcacaaccactacacgcagaagagcctctccctgtctccgggggagccagcatttactccaggacccaacatagaactccagaaagactctgactgcccgaattctcaggtacagctgcagcagtcaggggctgaggtgaagaagcctgggtcctcggtgaaggtctcctgcaaggcttctggaggcaccatcagcaactatgctatcagttgggtgcggctggcccctggacaaggtcttgagtggatgggaagtatcgtccctcttcatgggacaacaaacttcgcacagaaattccagggcagagtcacgatcaccgcggacgagtccacgagcacatcctacatggaggtgaacgtcctgacatatgaagacacggcgatgtattattgtgcgtctctcaattggggctactggggccggggcaccctggtcaccgtctcgagtggaggcggcggttcaggcggaggtggctctggcggtggcggaagtgcacttaattttatgctgactcagccccactctgtgtcggagtctccggggaagacggtaaccatctcctgcaccggcagtagtggcagcattgccagcaactatgtgcagtggtaccagcagcgcccggacagtgcccccaccactgtgatctatgaggataatcgaagatcctctggagtccctgatcggttctctggctccatcgacagctcctccaactctgcctccctcagcatctctggactgaagactgaggacgaggctgactactactgtcagtcctatgatagtagcggtcatgtggtcttcggcggagggaccaagctgaccgtcctaggt

SEQ ID NO: 506 - protein, 518 aa, Artificial sequence [sequence omitted]

SEQ ID NO: 507 - DNA, 1536 bp, Artificial sequence
  Synthetic polynucleotide W0057 DNA sequence
atggaagcaccagcgcagcttctcttcctcctgctactctggctcccagataccaccggttcctcgagcgagcccaaatcttctgacaaaactcacacatgcccaccgtgcccagcacctgaactcctgggtggaccgtcagtcttcctcttccccccaaaacccaaggacaccctcatgatctcccggacccctgaggtcacatgcgtggtggtggacgtgagccacgaagaccctgaggtcaagttcaactggtacgtggacggcgtggaggtgcataatgccaagacaaagccgcgggaggagcagtacaacagcacgtaccgtgtggtcagcgtcctcaccgtcctgcaccaggactggctgaatggcaaggagtacaagtgcaaggtctccaacaaagccctcccagcccccatcgagaaaaccatctccaaagccaaagggcagccccgagaaccacaggtgtacaccctgcccccatcccgggatgagctgaccaagaaccaggtcagcctgacctgcctggtcaaaggcttctatccaagcgacatcgccgtggagtgggagagcaatgggcagccggagaacaactacaagaccacgcctcccgtgctggactccgacggctccttcttcctctacagcaagctcaccgtggacaagagcaggtggcagcaggggaacgtcttctcatgctccgtgatgcatgaggctctgcacaaccactacacgcagaagagcctctccctgtctccgggtggcggtggctctggtggcggtggctctggcggtggtgggaattctcaggtacagctgcagcagtcaggggctgaggtgaagaagcctgggtcctcggtgaaggtctcctgcaaggcttctggaggcaccatcagcaactatgctatcagttgggtgcggctggcccctggacaaggtcttgagtggatgggaagtatcgtccctcttcatgggacaacaaacttcgcacagaaattccagggcagagtcacgatcaccgcggacgagtccacgagcacatcctacatggaggtgaacgtcctgacatatgaagacacggcgatgtattattgtgcgtctctcaattggggctactggggccggggcaccctggtcaccgtctcgagtggaggcggcggttcaggcggaggtggctctggcggtggcggaagtgcacttaattttatgctgactcagccccactctgtgtcggagtctccggggaagacggtaaccatctcctgcaccggcagtagtggcagcattgccagcaactatgtgcagtggtaccagcagcgcccggacagtgcccccaccactgtgatctatgaggataatcgaagatcctctggagtccctgatcggttctctggctccatcgacagctcctccaactctgcctccctcagcatctctggactgaagactgaggacgaggctgactactactgtcagtcctatgatagtagcggtcatgtggtcttcggcggagggaccaagctgaccgtcctaggt

SEQ ID NO: 508 - protein, 512 aa, Artificial sequence
  Synthetic polypeptide W0057 Amino acid sequence
  MISC_FEATURE (1)..(20): Leader sequence
  MISC_FEATURE (21)..(23): Junction
  MISC_FEATURE (24)..(38): Hinge region (linker)
  MISC_FEATURE (39)..(254): CH2CH3 region
  MISC_FEATURE (255)..(269): PIMS linker
  MISC_FEATURE (270)..(294): Heavy region
  MISC_FEATURE (295)..(302): Heavy chain CDR sub-domains
  MISC_FEATURE (303)..(316): Heavy region
  MISC_FEATURE (317)..(327): Heavy chain CDR sub-domains
  MISC_FEATURE (328)..(365): Heavy region
  MISC_FEATURE (366)..(372): Heavy chain CDR sub-domains
  MISC_FEATURE (373)..(383): Heavy region
  MISC_FEATURE (384)..(400): Hinge region (linker)
  MISC_FEATURE (401)..(425): Light region
  MISC_FEATURE (426)..(433): Light chain CDR sub-domains
  MISC_FEATURE (434)..(447): Light region
  MISC_FEATURE (448)..(453): Light chain CDR sub-domains
  MISC_FEATURE (454)..(491): Light region
  MISC_FEATURE (492)..(501): Light chain CDR sub-domains
  MISC_FEATURE (502)..(512): Light region
MEAPAQLLFLLLLWLPDTTGSSSEPKSSDKTHTCPPCPAPELLGGPSVFLFPPKPKDTLMISRTPEVTCVVVDVSHEDPEVKFNWYVDGVEVHNAKTKPREEQYNSTYRVVSVLTVLHQDWLNGKEYKCKVSNKALPAPIEKTISKAKGQPREPQVYTLPPSRDELTKNQVSLTCLVKGFYPSDIAVEWESNGQPENNYKTTPPVLDSDGSFFLYSKLTVDKSRWQQGNVFSCSVMHEALHNHYTQKSLSLSPGGGGSGGGGSGGGGNSQVQLQQSGAEVKKPGSSVKVSCKASGGTISNYAISWVRLAPGQGLEWMGSIVPLHGTTNFAQKFQGRVTITADESTSTSYMEVNVLTYEDTAMYYCASLNWGYWGRGTLVTVSSGGGGSGGGGSGGGGSALNFMLTQPHSVSESPGKTVTISCTGSSGSIASNYVQWYQQRPDSAPTTVIYEDNRRSSGVPDRFSGSIDSSSNSASLSISGLKTEDEADYYCQSYDSSGHVVFGGGTKLTVLG

SEQ ID NO: 509 - DNA, 30 bp, Artificial sequence
  Synthetic polynucleotide Reverse primer for oligonucleotide-directed mutagenesis using PCR
ttcagaattcggagaatgacgtgctttctg

SEQ ID NO: 510 - DNA, 1568 bp, Artificial sequence
  Synthetic polynucleotide W0055
atggaagcaccagcgcagcttctcttcctcctgctactctggctcccagataccaccggttcctcgagcgagcccaaatcttctgacaaaactcacacatgcccaccgtgcccagcacctgaactcctgggtggaccgtcagtcttcctcttccccccaaaacccaaggacaccctcatgatctcccggacccctgaggtcacatgcgtggtggtggacgtgagccacgaagaccctgaggtcaagttcaactggtacgtggacggcgtggaggtgcataatgccaagacaaagccgcgggaggagcagtacaacagcacgtaccgtgtggtcagcgtcctcaccgtcctgcaccaggactggctgaatggcaaggagtacaagtgcaaggtctccaacaaagccctcccagcccccatcgagaaaaccatctccaaagccaaagggcagccccgagaaccacaggtgtacaccctgcccccatcccgggatgagctgaccaagaaccaggtcagcctgacctgcctggtcaaaggcttctatccaagcgacatcgccgtggagtgggagagcaatgggcagccggagaacaactacaagaccacgcctcccgtgctggactccgacggctccttcttcctctacagcaagctcaccgtggacaagagcaggtggcagcaggggaacgtcttctcatgctccgtgatgcatgaggctctgcacaaccactacacgcagaagagcctctccctgtctccgggtcagaggcacaacaattcttccctgaatacaagaactcagaaagcacgtcattgtccgaattctgaaattgaactcacccagtctccagcaatcatgtctgtatttccaggggagaaggtcaccatgacctgcagtgccagctcaattgtacgttatatgtattggttccagcagaagccagggtcctcccccagactcctgatttatgacacatccagcctgtcttcctgtcttccggagtccctgttcgcttcagtggcagtgggtctgggacctcctattctctcacaatcagccgaatggaggctgtagatgctgccacttatttctgccagcagtggagtagttacccactcacgttcggtggtgggaccaagctggaaataaaagggggtggaggctctggtggcggtggctctggcggaggtggatccggtggcggcggctctgaggtgcagctggaggaatctggaggaggcttggtgcaacctggagggtccatgaaactctcctgtgttgcctctggattcactttcagtaattcctggatgaactgggtccgccagtctccagaaaaggggcttgaatgggttgctgaaattagattgaaatctaataattatgcaacacgttatgcggagtctgtgaaagggaggttcaccatctcaagagatgattccaaaagtagtgtctacctgcaaatgaacaacttaagatctgaagacactgccatttattactgtacccccttatcttactcctttgactactggggccaagggaccacggtcaccgtctccagctga

SEQ ID NO: 511 - protein, 520 aa, Artificial sequence
  Synthetic polypeptide W0055
  MISC_FEATURE (1)..(20): Leader sequence
  MISC_FEATURE (21)..(23): Junction
  MISC_FEATURE (24)..(38): Hinge region (Linker)
  MISC_FEATURE (39)..(254): CH2CH3 region
  MISC_FEATURE (255)..(275): PIMS linker
  MISC_FEATURE (276)..(301): Light region
  MISC_FEATURE (302)..(306): Light chain CDR sub-domain
  MISC_FEATURE (307)..(323): Light region
  MISC_FEATURE (324)..(326): Light chain CDR sub-domain
  MISC_FEATURE (327)..(362): Light region
  MISC_FEATURE (363)..(371): Light chain CDR sub-domain
  MISC_FEATURE (372)..(381): Light region
  MISC_FEATURE (382)..(401): Hinge region (Linker)
  MISC_FEATURE (402)..(426): Heavy region
  MISC_FEATURE (427)..(434): Heavy chain CDR sub-domain
  MISC_FEATURE (435)..(451): Heavy region
  MISC_FEATURE (452)..(461): Heavy chain CDR sub-domain
  MISC_FEATURE (462)..(499): Heavy region
  MISC_FEATURE (500)..(508): Heavy chain CDR sub-domain
  MISC_FEATURE (509)..(519): Heavy region
  MISC_FEATURE (520)..(520): Xaa is a stop codon
MEAPAQLLFLLLLWLPDTTGSSSEPKSSDKTHTCPPCPAPELLGGPSVFLFPPKPKDTLMISRTPEVTCVVVDVSHEDPEVKFNWYVDGVEVHNAKTKPREEQYNSTYRVVSVLTVLHQDWLNGKEYKCKVSNKALPAPIEKTISKAKGQPREPQVYTLPPSRDELTKNQVSLTCLVKGFYPSDIAVEWESNGQPENNYKTTPPVLDSDGSFFLYSKLTVDKSRWQQGNVFSCSVMHEALHNHYTQKSLSLSPGQRHNNSSLNTRTQKARHCPNSEIELTQSPAIMSVFPGEKVTMTCSASSIVRYMYWFQQKPGSSPRLLIYDTSSLSSGVPVRFSGSGSGTSYSLTISRMEAVDAATYFCQQWSSYPLTFGGGTKLEIKGGGGSGGGGSGGGGSGGGGSEVQLEESGGGLVQPGGSMKLSCVASGFTFSNSWMNWVRQSPEKGLEWVAEIRLKSNNYATRYAESVKGRFTISRDDSKSSVYLQMNNLRSEDTAIYYCTPLSYSFDYWGQGTTVTVSSX

SEQ ID NO: 512 - protein, 17 aa, Artificial sequence
  Synthetic polypeptide linker H10
EPKSTDKTHTCPPCPNS

SEQ ID NO: 513 - protein, 13 aa, Artificial sequence
  Synthetic polypeptide linker H14
GCPPCPGGGGSNS

SEQ ID NO: 514 - protein, 9 aa, Artificial sequence
  Synthetic polypeptide linker H34
GCPPCPGNS

SEQ ID NO: 515 - protein, 13 aa, Artificial sequence
  Synthetic polypeptide linker H35
GGGGSCPPCPGNS

SEQ ID NO: 516 - protein, 9 aa, Artificial sequence
  Synthetic polypeptide linker H41
GCPPCPANS

SEQ ID NO: 517 - protein, 8 aa, Artificial sequence
  Synthetic polypeptide linker H42
GCPPCPNS

SEQ ID NO: 518 - protein, 8 aa, Artificial sequence
  Synthetic polypeptide linker H43
GCPPCPNS

SEQ ID NO: 519 - protein, 15 aa, Artificial sequence
  Synthetic polypeptide linker H47
LSVKADFLTPSIGNS

SEQ ID NO: 520 - protein, 12 aa, Artificial sequence
  Synthetic polypeptide linker H48
KADFLTPSIGNS

SEQ ID NO: 521 - protein, 15 aa, Artificial sequence
  Synthetic polypeptide linker H50
LSVLANFSQPEIGNS

SEQ ID NO: 522 - protein, 15 aa, Artificial sequence
  Synthetic polypeptide linker H51
LSVLANFSQPEIGNS

SEQ ID NO: 523 - protein, 11 aa, Artificial sequence
  Synthetic polypeptide linker H52
SQPEIVPISNS

SEQ ID NO: 524 - protein, 16 aa, Artificial sequence
  Synthetic polypeptide linker H53
SQPEIVPISCPPCPNS

SEQ ID NO: 525 - protein, 19 aa, Artificial sequence
  Synthetic polypeptide linker H54
SVLANFSQPEISCPPCPNS

SEQ ID NO: 526 - protein, 15 aa, Artificial sequence
  Synthetic polypeptide linker H55
RIHQMNSELSVLANS

SEQ ID NO: 527 - protein, 12 aa, Artificial sequence
  Synthetic polypeptide linker H56
QMNSELSVLANS

SEQ ID NO: 528 - protein, 10 aa, Artificial sequence
  Synthetic polypeptide linker H57
VSERPFPPNS

SEQ ID NO: 529 - protein, 15 aa, Artificial sequence
  Synthetic polypeptide linker H58
KPFFTCGSADTCPNS

SEQ ID NO: 530 - protein, 15 aa, Artificial sequence
  Synthetic polypeptide linker H59
KPFFTCGSADTCPNS

SEQ ID NO: 531 - protein, 15 aa, Artificial sequence
  Synthetic polypeptide linker H60
QYNCPGQYTFSMPNS

SEQ ID NO: 532 - protein, 21 aa, Artificial sequence
  Synthetic polypeptide linker H61
EPAFTPGPNIELQKDSDCPNS

SEQ ID NO: 533 - protein, 21 aa, Artificial sequence
  Synthetic polypeptide linker H62
QRHNNSSLNTRTQKARHCPNS

SEQ ID NO: 534 - protein, 20 aa, Artificial sequence
  Synthetic polypeptide linker H63
NSLFNQEVQIPLTESYCPNS

SEQ ID NO: 535 - protein, 122 aa, Artificial sequence
  Synthetic polypeptide linker H64
RTRYLQVSQQLQQTNRVLEVTNSSLRQQLRLKITQLGQSAEDLQGSRRELAQSQEALQVEQRAHQAAEGQLQACQADRQKTKETLQSEEQQRRALEQKLSNMENRLKPFFTCGSADTCCPNS

SEQ ID NO: 536 - protein, 21 aa, Artificial sequence
  Synthetic polypeptide linker H65
QRHNNSSLNTRTQKARHSPNS

SEQ ID NO: 537 - protein, 9 aa, Artificial sequence
  Synthetic polypeptide linker H66
EEEEDEGNS

SEQ ID NO: 538 - protein, 20 aa, Artificial sequence
  Synthetic polypeptide linker H67
EEEEDEEDEEDEEEEEDGNS

SEQ ID NO: 539 - protein, 5 aa, Artificial sequence
  Synthetic polypeptide linker
GGGGS

SEQ ID NO: 540 - protein, 25 aa, Artificial sequence
  Synthetic polypeptide linker
GGGGSGGGGSGGGGSGGGGSGGGGS

SEQ ID NO: 541 - protein, 20 aa, Artificial sequence
  Synthetic polypeptide linker STD3
NYGGGGSGGGGSGGGGSGNS

SEQ ID NO: 542 - protein, 36 aa, Artificial sequence
  Synthetic polypeptide linker STD4
NYGGGGSGGGGSGGGGSNYGGGGSGGGGSGGGGSNS

SEQ ID NO: 543 - protein, 8 aa, Artificial sequence
  Synthetic polypeptide linker H9
GSPPSPNS

SEQ ID NO: 544 - protein, 17 aa, Artificial sequence
  Synthetic polypeptide llinker H11
EPKSTDKTHTSPPSPNS

SEQ ID NO: 545 - protein, 17 aa, Artificial sequence
  Synthetic polypeptide linker H12
EPKSTDKTHTCPPCPNS

SEQ ID NO: 546 - protein, 19 aa, Artificial sequence
  Synthetic polypeptide linker H17a
LSVKADFLTPSISPPCPNS

SEQ ID NO: 547 - protein, 13 aa, Artificial sequence
  Synthetic polypeptide linker H45a
GGGASCPPCAGNS

SEQ ID NO: 548 - protein, 13 aa, Artificial sequence
  Synthetic polypeptide linker H46a
GGGASCPPCAGNS

SEQ ID NO: 549 - DNA, 30 bp, Artificial sequence; identical to SEQ ID NO: 509
  Synthetic polynucleotide

SEQ ID NO: 550 - protein, 22 aa, Artificial Sequence
  Synthetic polypeptide
MDFQVQIFSFLLISASVIMSRG

What is claimed is:

1. A specific binding protein comprising:
a constant sub-region derived from an antibody;
a PIMS linker disposed C-terminal to the constant sub-region; and
a specific binding domain comprising at least one of a V_{L} domain and a V_{H} domain, the specific binding domain disposed C-terminal to the PIMS linker, wherein the specific binding protein specifically binds at least one target and exhibits at least one effector function of an antibody molecule.

2. The specific binding protein according to claim 1 wherein the constant sub-region comprises a C_{H2} domain and a C_{H3} domain, wherein at least one of the C_{H2} domain and the C_{H3} domain is a complete antibody domain.

3. The specific binding protein according to claim 2 wherein the antibody domain is selected from the group consisting of IgG, IgE, IgD, IgA and IgM antibody domains.

4. The specific binding protein according to claim 2 wherein at least one of the C_{H2} domain and the C_{H3} domain comprises a sequence selected from the group consisting of SEQ ID NO:377 and SEQ ID NO:379.

5. The specific binding protein according to claim 1 wherein the effector function is antibody-dependent cellular cytotoxicity or complement-mediated cytotoxicity.

6. The specific binding protein according to claim 1 wherein the PIMS linker is derived from a stalk region of a type II C-lectin.

7. The specific binding protein according to claim 1 wherein the PIMS linker is selected from the group consisting of an antibody hinge region, a CD72 stalk region, NKG2a and NKG2a C18S.

8. The specific binding protein according to claim 1 wherein the PIMS linker is an antibody hinge region selected from the group consisting of IgG, IgA, IgD, IgE hinges and variants thereof.

9. The specific binding protein according to claim 8 wherein the hinge is an antibody hinge region selected from the group consisting of human IgG1, human IgG2, human IgG3, human IgG4, and human variants thereof.

10. The specific binding protein according to claim 1 wherein the PIMS linker has a single cysteine residue for formation of an interchain disulfide bond.

11. The specific binding protein according to claim 1 wherein the PIMS linker has two cysteine residues for formation of interchain disulfide bonds.

12. The specific binding protein according to claim 1 wherein the PIMS linker comprises a sequence selected from the group consisting of SEQ ID NOS:61-118.

13. The specific binding protein according to claim 1 wherein the protein specifically binds a target selected from the group consisting of CD3, CD19, CD20, CD28, CD37 and DR.

14. The specific binding protein according to claim 1 wherein the protein is selected from the group consisting of W0001, W0002, W0003, W0004, W0005, W0006, W0007, W0008, W0009, W0011, W0012, W0023, W0024, W0025, W0028, W0029, W0030, W0031, W0035, W0036, W0041, W0042, W0044, W0045, W0050, W0051, W0052, W0053, W0055, W0056, W0057, W0083, W0087, W0094, W0095, W0096 and W0097.

15. The specific binding protein according to claim 1 wherein the V_{L} domain and the V_{H} domain are separated by an interdomain linker.

16. The specific binding protein according to claim 15 wherein the structure of the interdomain linker is (Gly₄Ser)ₙ, where n=1-5.

17. The specific binding protein according to claim 15 wherein the interdomain linker comprises a sequence selected from the group consisting of SEQ ID NO:544, SEQ ID NO:545, SEQ ID NO:184, SEQ ID NO:240, SEQ ID NO:242, SEQ ID NO:243, SEQ ID NO:245, SEQ ID NO:247, SEQ ID NO:248, SEQ ID NO:539 and SEQ ID NO:540.

18. The specific binding protein according to claim 1 wherein at least one of the V_{L} domain and the V_{H} domain comprises a sequence selected from the group consisting of residues 23-128 of SEQ ID NO:2, residues 145-265 of SEQ ID NO:2, residues 520-640 of SEQ ID NO:2, residues 661-772 of SEQ ID NO:2, residues 508-629 of SEQ ID NO:28, residues 647-754 of SEQ ID NO:28, residues 508-629 of SEQ ID NO:30, residues 652-759 of SEQ ID NO:30, residues 21-127 of SEQ ID NO:44, residues 143-264 of SEQ ID NO:44, residues 1-121 of SEQ ID NO:354 and residues 134-239 of SEQ ID NO:354.

19. The specific binding protein according to claim 1 further comprising a hinge disposed N-terminal to the sub-region.

20. The specific binding protein according to claim 19 wherein the hinge comprises the same sequence as the PIMS linker disposed between the constant sub-region and the specific binding domain.

21. The specific binding protein according to claim 1, further comprising at least a second specific binding domain disposed C-terminal to the constant sub-region.

22. The specific binding protein according to claim 21, wherein each of the specific binding domains binds to the same target.

23. A method of producing the specific binding protein according to claim 1 comprising:
contacting a cell comprising a polynucleotide encoding the specific binding protein according to claim 1 and a culture medium; and
incubating the cell in the culture medium under conditions suitable for expression of the polynucleotide.

24. A method of treating a condition selected from the group consisting of cancer, inflammation and an autoimmune disorder comprising administering an effective amount of a specific binding protein according to claim 1 to an organism in need.

25. The method according to claim 24 wherein the organism is a human.

26. A method of ameliorating a symptom of a condition selected from the group consisting of cancer, inflammation and an autoimmune disorder comprising administering an effective amount of a specific binding protein according to claim 1 to an organism in need.

27. The method according to claim 26 wherein the organism is a human.

28. A use of a specific binding protein according to claim 1 in the preparation of a medicament for the treatment of a condition selected from the group consisting of cancer, inflammation and an autoimmune disorder.

29. The use according to claim 28 wherein the organism is a human.

30. A use of a specific binding protein according to claim 1 in the preparation of a medicament for ameliorating a symptom of a condition selected from the group consisting of cancer, inflammation and an autoimmune disorder.

31. The use according to claim 30 wherein the organism is a human.
